United States Patent Application Publication US 2024/0209406 A1 - sequence listing, part 2

SEQ ID NO: 3803 - DNA, 639 bp, synthetic construct
  misc_feature 1..639: note = Variant of 3'O-kinase
  source 1..639: mol_type = other DNA
atggcgtttaccattggtttaacaggagggatcgcagcgggcaaatcgactgtgagtgccatgatgcgtgaactgggtctgccggtcatcgatgctgacgaggcagcacgcgccgttatgcgtccaggcgaagaagcttatcgccagattgtagctgcgttcggtccgggcactcttcgtgccgatggcgagatcgatcgccagaaactgggtgctatccgcttttcggacgaacaacaacgtaaggtgctgaatgcgattgtaggtcctgcagtcctgaagaagatgctcgctgagaaagaagctcatatccgctcaggcgccaagacggttgtgctggatatcccgctgctgttcgaatccggattgacccattgggtcgacaaagtgctcgtggtgtacgtcgatgatgatgttcagttacgccgccttatggcacgtaacgggtttactgaagaagaagctctgaagcgcattcgttcacagtggcccagtgcggagaaagttaaacgtgcagacgctgtcatcgacaataatggcacgattgaagaaacccgccgccagctgctggccattttacaccagtgggatctgctgggtaagggtggctccggccaccatcatcaccatcactaatga

SEQ ID NO: 3804 - protein, 211 aa, synthetic construct
  REGION 1..211: note = Variant of 3'O-kinase
MAFTIGLTGGIAAGKSTVSAMMRELGLPVIDADEAARAVMRPGEEAYRQIVAAFGPGTLRADGEIDRQKLGAIRFSDEQQRKVLNAIVGPAVLKKMLAEKEAHIRSGAKTVVLDIPLLFESGLTHWVDKVLVVYVDDDVQLRRLMARNGFTEEEALKRIRSQWPSAEKVKRADAVIDNNGTIEETRRQLLAILHQWDLLGKGGSGHHHHHH

SEQ ID NO: 3805 - DNA, 639 bp, synthetic construct
  misc_feature 1..639: note = Variant of 3'O-kinase
  source 1..639: mol_type = other DNA
atggcgtttaccattggtttaacaggagggatcgcagcgggcaaatcgactgtgagtgccatgatgcgtgaactgggtctgccggtcatcgatgctgacgaggcagcacgcgccgttatgcgtccaggcgaagaagcttatcgccagattgtagctgcgttcggtccgggcattcttcgtgccgatggcgagatcgatcgccagaaactgggtgctatccgcttttcggacgaacaacaacgtaaggtgctgaatgcgattgtaggtcctgcagtcctgaagaagatgctcgctgagaaagaagctcatatccgctcaggcgccaagacggttgtgctggatatcccgctgctgttcgaatccggattgacccattgggtcgacaaagtgctcgtggtgtacgtcgatgatgatgttcagttacgccgccttatggcacgtaacgggtttactgaagaagaagctctgaagcgcattcgttcacagtggcccagtgcggagaaagttaaacgtgcagacgctgtcatcgacaataatggcacgattgaagaaacccgccgccagctgctggccattttacaccagtgggatctgctgggtagtggtggctccggccaccatcatcaccatcactaatga

SEQ ID NO: 3806 - protein, 211 aa, synthetic construct
  REGION 1..211: note = Variant of 3'O-kinase
MAFTIGLTGGIAAGKSTVSAMMRELGLPVIDADEAARAVMRPGEEAYRQIVAAFGPGILRADGEIDRQKLGAIRFSDEQQRKVLNAIVGPAVLKKMLAEKEAHIRSGAKTVVLDIPLLFESGLTHWVDKVLVVYVDDDVQLRRLMARNGFTEEEALKRIRSQWPSAEKVKRADAVIDNNGTIEETRRQLLAILHQWDLLGSGGSGHHHHHH

SEQ ID NO: 3807 - DNA, 639 bp, synthetic construct
  misc_feature 1..639: note = Variant of 3'O-kinase
  source 1..639: mol_type = other DNA
atggcgtttaccattggtttaacaggagggatcgcagcgggcaaatcgactgtgagtgccatgatgcgtgaactgggtctgccggtcatcgatgctgacgaggcagcacgcgccgttatgcgtccaggcgcggaagcttatcgccagattgtagctgcgttcggtccgggcattcttcgtgccgatggcgagatcgatcgccagaaactgggtgctatccgcttttcggacgaacaacaacgtaaggtgctgaatgcgattgtaggtcctgcagtcctgaagaagatgctcgctgagaaagaagctcatatccgctcaggcgccaagacggttgtgctggatatcccgctgctgttcgaatccggattgacccattgggtcgacaaagtgctcgtggtgtacgtcgatgatgatgttcagttacgccgccttatggcacgtaacgggtttactgaagaagaagctctgaagcgcattcgttcacagtggcccagtgcggagaaagttaaacgtgcagacgctgtcatcgacaataatggcacgattgaagaaacccgccgccagctgctggccattttacaccagtgggatctgctgggtaagggtggctccggccaccatcatcaccatcactaatga

SEQ ID NO: 3808 - protein, 211 aa, synthetic construct
  REGION 1..211: note = Variant of 3'O-kinase
MAFTIGLTGGIAAGKSTVSAMMRELGLPVIDADEAARAVMRPGAEAYRQIVAAFGPGILRADGEIDRQKLGAIRFSDEQQRKVLNAIVGPAVLKKMLAEKEAHIRSGAKTVVLDIPLLFESGLTHWVDKVLVVYVDDDVQLRRLMARNGFTEEEALKRIRSQWPSAEKVKRADAVIDNNGTIEETRRQLLAILHQWDLLGKGGSGHHHHHH

SEQ ID NO: 3809 - DNA, 639 bp, synthetic construct
  misc_feature 1..639: note = Variant of 3'O-kinase
  source 1..639: mol_type = other DNA
atggcgtttaccattggtttaacaggagggatcgcagcgggcaaatcgactgtgagtgccatgatgcgtgaactgggtctgccggtcatcgatgctgacgaggcagcacgcgccgttatgcgtccaggcgaagaagcttatcgccagattgtagctgcgttcggtccgggcattcttcgtgccgatggcgagatcgatcgccagaaactgggtgctatccgcttttcggacgaacaacaacgtaaggtgctgaatgcgattgtaggtcctgcagtcctgaagaagatgctcgctgagaaagaagctcatatccgctcaggcgccaagacggttgtgctggatatcccgctgctgttcgaatccggattgacccattgggtcgacaaagtgctcgtggtgtacgtcgatgatgatgttcagttacgccgccttatggcacgtaacgggtttactgaagaagaagctctgaagcgcattcgttcacagtggcccagtgcgacgaaagttaaacgtgcagacgctgtcatcgacaataatggcacgattgaagaaacccgccgccagctgctggccattttacaccagtgggatctgctgggtaagggtggctccggccaccatcatcaccatcactaatga

SEQ ID NO: 3810 - protein, 211 aa, synthetic construct
  REGION 1..211: note = Variant of 3'O-kinase
MAFTIGLTGGIAAGKSTVSAMMRELGLPVIDADEAARAVMRPGEEAYRQIVAAFGPGILRADGEIDRQKLGAIRFSDEQQRKVLNAIVGPAVLKKMLAEKEAHIRSGAKTVVLDIPLLFESGLTHWVDKVLVVYVDDDVQLRRLMARNGFTEEEALKRIRSQWPSATKVKRADAVIDNNGTIEETRRQLLAILHQWDLLGKGGSGHHHHHH

SEQ ID NO: 3811 - DNA, 639 bp, synthetic construct
  misc_feature 1..639: note = Variant of 3'O-kinase
  source 1..639: mol_type = other DNA
atggcgtttaccattggtttaacaggagggatcgcagcgggcaaatcgactgtgagtgccatgatgcgtgaactgggtctgccggtcatcgatgctgacgaggcagcacgcgccgttatgcgtccaggcgaagaagcttatcgccagattgtagcttttttcggtccgggcattcttcgtgccgatggcgagatcgatcgccagaaactgggtgctatccgcttttcggacgaacaacaacgtaaggtgctgaatgcgattgtaggtcctgcagtcctgaagaagatgctcgctgagaaagaagctcatatccgctcaggcgccaagacggttgtgctggatatcccgctgctgttcgaatccggattgacccattgggtcgacaaagtgctcgtggtgtacgtcgatgatgatgttcagttacgccgccttatggcacgtaacgggtttactgaagaagaagctctgaagcgcattcgttcacagtggcccagtgcggagaaagttaaacgtgcagacgctgtcatcgacaataatggcacgattgaagaaacccgccgccagctgctggccattttacaccagtgggatctgctgggtaagggtggctccggccaccatcatcaccatcactaatga

SEQ ID NO: 3812 - protein, 211 aa, synthetic construct
  REGION 1..211: note = Variant of 3'O-kinase
MAFTIGLTGGIAAGKSTVSAMMRELGLPVIDADEAARAVMRPGEEAYRQIVAFFGPGILRADGEIDRQKLGAIRFSDEQQRKVLNAIVGPAVLKKMLAEKEAHIRSGAKTVVLDIPLLFESGLTHWVDKVLVVYVDDDVQLRRLMARNGFTEEEALKRIRSQWPSAEKVKRADAVIDNNGTIEETRRQLLAILHQWDLLGKGGSGHHHHHH

SEQ ID NO: 3813 - DNA, 639 bp, synthetic construct
  misc_feature 1..639: note = Variant of 3'O-kinase
  source 1..639: mol_type = other DNA
atggcgcctaccattggtttaacaggagggatcgcagcgggcaaatcgactgtgagtgccatgatgcgtgaactgggtctgccggtcatcgatgctgacgaggcagcacgcgccgttatgcgtccaggcgaagaagcttatcgccagattgtagctgcgttcggtccgggcattcttcgtgccgatggcgagatcgatcgccagaaactgggtgctatccgcttttcggacgaacaacaacgtaaggtgctgaatgcgattgtaggtcctgcagtcctgaagaagatgctcgctgagaaagaagctcatatccgctcaggcgccaagacggttgtgctggatatcccgctgctgttcgaatccggattgacccattgggtcgacaaagtgctcgtggtgtacgtcgatgatgatgttcagttacgccgccttatggcacgtaacgggtttactgaagaagaagctctgaagcgcattcgttcacagtggcccagtgcggagaaagttaaacgtgcagacgctgtcatcgacaataatggcacgattgaagaaacccgccgccagctgctggccattttacaccagtgggatctgctgggtaagggtggctccggccaccatcatcaccatcactaatga

SEQ ID NO: 3814 - protein, 211 aa, synthetic construct
  REGION 1..211: note = Variant of 3'O-kinase
MAPTIGLTGGIAAGKSTVSAMMRELGLPVIDADEAARAVMRPGEEAYRQIVAAFGPGILRADGEIDRQKLGAIRFSDEQQRKVLNAIVGPAVLKKMLAEKEAHIRSGAKTVVLDIPLLFESGLTHWVDKVLVVYVDDDVQLRRLMARNGFTEEEALKRIRSQWPSAEKVKRADAVIDNNGTIEETRRQLLAILHQWDLLGKGGSGHHHHHH

SEQ ID NO: 3815 - DNA, 639 bp, synthetic construct
  misc_feature 1..639: note = Variant of 3'O-kinase
  source 1..639: mol_type = other DNA
atggcgtttaccattggtttaacaggagggatcgcagcgggcaaatcgactgtgagtgccatgatgcgtgaactgggtctgccggtcatcgatgctgacgaggcagcacgcgccgttatgcgtccaggcgaagaagcttatcgccagattgtagctgcgttcggtccgggcattcttcgtgccgatggcgagatcgatcgccagaaactgggtgctatccgcttttcggacgaacaacaacgtaaggtgctgaatgcgattgtaggtcctgcagtcctggcgaagatgctcgctgagaaagaagctcatatccgctcaggcgccaagacggttgtgctggatatcccgctgctgttcgaatccggattgacccattgggtcgacaaagtgctcgtggtgtacgtcgatgatgatgttcagttacgccgccttatggcacgtaacgggtttactgaagaagaagctctgaagcgcattcgttcacagtggcccagtgcggagaaagttaaacgtgcagacgctgtcatcgacaataatggcacgattgaagaaacccgccgccagctgctggccattttacaccagtgggatctgctgggtaagggtggctccggccaccatcatcaccatcactaatga

SEQ ID NO: 3816 - protein, 211 aa, synthetic construct
  REGION 1..211: note = Variant of 3'O-kinase
MAFTIGLTGGIAAGKSTVSAMMRELGLPVIDADEAARAVMRPGEEAYRQIVAAFGPGILRADGEIDRQKLGAIRFSDEQQRKVLNAIVGPAVLAKMLAEKEAHIRSGAKTVVLDIPLLFESGLTHWVDKVLVVYVDDDVQLRRLMARNGFTEEEALKRIRSQWPSAEKVKRADAVIDNNGTIEETRRQLLAILHQWDLLGKGGSGHHHHHH

SEQ ID NO: 3817 - DNA, 639 bp, synthetic construct
  misc_feature 1..639: note = Variant of 3'O-kinase
  source 1..639: mol_type = other DNA
atggcgtttaccattggtttaacaggagggatcgcagcgggcaaatcgactgtgagtgccatgatgcgtgaactgggtctgccggtcatcgatgctgacgaggcagcacgcgccgttatgcgtccaggcgaagaagcttatcgccagtctgtagctgcgttcggtccgggcattcttcgtgccgatggcgagatcgatcgccagaaactgggtgctatccgcttttcggacgaacaacaacgtaaggtgctgaatgcgattgtaggtcctgcagtcctgaagaagatgctcgctgagaaagaagctcatatccgctcaggcgccaagacggttgtgctggatatcccgctgctgttcgaatccggattgacccattgggtcgacaaagtgctcgtggtgtacgtcgatgatgatgttcagttacgccgccttatggcacgtaacgggtttactgaagaagaagctctgaagcgcattcgttcacagtggcccagtgcggagaaagttaaacgtgcagacgctgtcatcgacaataatggcacgattgaagaaacccgccgccagctgctggccattttacaccagtgggatctgctgggtaagggtggctccggccaccatcatcaccatcactaatga

SEQ ID NO: 3818 - protein, 211 aa, synthetic construct
  REGION 1..211: note = Variant of 3'O-kinase
MAFTIGLTGGIAAGKSTVSAMMRELGLPVIDADEAARAVMRPGEEAYRQSVAAFGPGILRADGEIDRQKLGAIRFSDEQQRKVLNAIVGPAVLKKMLAEKEAHIRSGAKTVVLDIPLLFESGLTHWVDKVLVVYVDDDVQLRRLMARNGFTEEEALKRIRSQWPSAEKVKRADAVIDNNGTIEETRRQLLAILHQWDLLGKGGSGHHHHHH

SEQ ID NO: 3819 - DNA, 639 bp, synthetic construct
  misc_feature 1..639: note = Variant of 3'O-kinase
  source 1..639: mol_type = other DNA
atggcgtttaccattggtttaacaggagggatcgcagcgggcaaatcgactgtgagtgccatgatgcgtgaactgggtctgccggtcatcgatgctgacgaggcagcacgcgccgttatgcgtccaggcgaagaagcttatcgccagattgtagctgcgttcggtccgggcattagtcgtgccgatggcgagatcgatcgccagaaactgggtgctatccgcttttcggacgaacaacaacgtaaggtgctgaatgcgattgtaggtcctgcagtcctgaagaagatgctcgctgagaaagaagctcatatccgctcaggcgccaagacggttgtgctggatatcccgctgctgttcgaatccggattgacccattgggtcgacaaagtgctcgtggtgtacgtcgatgatgatgttcagttacgccgccttatggcacgtaacgggtttactgaagaagaagctctgaagcgcattcgttcacagtggcccagtgcggagaaagttaaacgtgcagacgctgtcatcgacaataatggcacgattgaagaaacccgccgccagctgctggccattttacaccagtgggatctgctgggtaagggtggctccggccaccatcatcaccatcactaatga

SEQ ID NO: 3820 - protein, 211 aa, synthetic construct
  REGION 1..211: note = Variant of 3'O-kinase
MAFTIGLTGGIAAGKSTVSAMMRELGLPVIDADEAARAVMRPGEEAYRQIVAAFGPGISRADGEIDRQKLGAIRFSDEQQRKVLNAIVGPAVLKKMLAEKEAHIRSGAKTVVLDIPLLFESGLTHWVDKVLVVYVDDDVQLRRLMARNGFTEEEALKRIRSQWPSAEKVKRADAVIDNNGTIEETRRQLLAILHQWDLLGKGGSGHHHHHH

SEQ ID NO: 3821 - DNA, 639 bp, synthetic construct
  misc_feature 1..639: note = Variant of 3'O-kinase
  source 1..639: mol_type = other DNA
atggcgtttaccattggtttaacaggagggatcgcagcgggcaaatcgactgtgagtgccatgatgcgtgaactgggtctgccggtcatcgatgctgacgaggcagcacgcgccgttatgcgtccaggcgaagaagcttatcgccagattgtagctgcgttcggtccgggcattcttcgtgccgatggcgagatcgatcgccagaaactgggtgctatccgcttttcggacgaacaacaacgtaaggtgctgaatgcgattgtaggtcctgcagtcctgaagaagatgctcgctgagaaagaagctcatatccgctcaggcgccaagacggttgtgctggatatcccgctgctgttcgaatccggattgacctattgggtcgacaaagtgctcgtggtgtacgtcgatgatgatgttcagttacgccgccttatggcacgtaacgggtttactgaagaagaagctctgaagcgcattcgttcacagtggcccagtgcggagaaagttaaacgtgcagacgctgtcatcgacaataatggcacgattgaagaaacccgccgccagctgctggccattttacaccagtgggatctgctgggtaagggtggctccggccaccatcatcaccatcactaatga

SEQ ID NO: 3822 - protein, 211 aa, synthetic construct
  REGION 1..211: note = Variant of 3'O-kinase
MAFTIGLTGGIAAGKSTVSAMMRELGLPVIDADEAARAVMRPGEEAYRQIVAAFGPGILRADGEIDRQKLGAIRFSDEQQRKVLNAIVGPAVLKKMLAEKEAHIRSGAKTVVLDIPLLFESGLTYWVDKVLVVYVDDDVQLRRLMARNGFTEEEALKRIRSQWPSAEKVKRADAVIDNNGTIEETRRQLLAILHQWDLLGKGGSGHHHHHH

SEQ ID NO: 3823 - DNA, 639 bp, synthetic construct
  misc_feature 1..639: note = Variant of 3'O-kinase
  source 1..639: mol_type = other DNA
atggcgtttaccattggtttaacaggagggatcgcagcgggcaaatcgtcggtgagtgccatgatgcgtgaactgggtctgccggtcatcgatgctgacgaggcagcacgcgccgttatgcgtccaggcgaagaagcttatcgccagattgtagctgcgttcggtccgggcattcttcgtgccgatggcgagatcgatcgccagaaactgggtgctatccgcttttcggacgaacaacaacgtaaggtgctgaatgcgattgtaggtcctgcagtcctgaagaagatgctcgctgagaaagaagctcatatccgctcaggcgccaagacggttgtgctggatatcccgctgctgttcgaatccggattgacccattgggtcgacaaagtgctcgtggtgtacgtcgatgatgatgttcagttacgccgccttatggcacgtaacgggtttactgaagaagaagctctgaagcgcattcgttcacagtggcccagtgcggagaaagttaaacgtgcagacgctgtcatcgacaataatggcacgattgaagaaacccgccgccagctgctggccattttacaccagtgggatctgctgggtaagggtggctccggccaccatcatcaccatcactaatga

SEQ ID NO: 3824 - protein, 211 aa, synthetic construct
  REGION 1..211: note = Variant of 3'O-kinase
MAFTIGLTGGIAAGKSSVSAMMRELGLPVIDADEAARAVMRPGEEAYRQIVAAFGPGILRADGEIDRQKLGAIRFSDEQQRKVLNAIVGPAVLKKMLAEKEAHIRSGAKTVVLDIPLLFESGLTHWVDKVLVVYVDDDVQLRRLMARNGFTEEEALKRIRSQWPSAEKVKRADAVIDNNGTIEETRRQLLAILHQWDLLGKGGSGHHHHHH

SEQ ID NO: 3825 - DNA, 639 bp, synthetic construct
  misc_feature 1..639: note = Variant of 3'O-kinase
  source 1..639: mol_type = other DNA
atggcgtttaccattggtttaacaggagggatcgcagcgggcaaatcgactgtgagtgccatgatgcgtgaactgggtctgccggtcatcgatgctgacgaggcagcacgcgccgttatgcgtccaggcgaagaagcttatcgccagattgtagctgcgttcggtccgggcattcttcgtgccgatggcgagatcgatcgccagaaactgggtgctatccgcttttcggacgaacaacaacgtaaggtgctgaatgcgattgtaggtcctgcagtcctgaagaagatgctcgctgagaaagaagctcatatccgctcaggcgccaagacggttgtgctggatatcccgctgctgttcgaatccggattgacccattgggtcgacaaagtgctcgtggtgtacgtcgatgatgatgttcagttacgccgccttatggcacgtaacgggtttactgaagaagaagctctgaagcgcattcgttcacagtggcccagtgcggagaaagttggtcgtgcagacgctgtcatcgacaataatggcacgattgaagaaacccgccgccagctgctggccattttacaccagtgggatctgctgggtaagggtggctccggccaccatcatcaccatcactaatga

SEQ ID NO: 3826 - protein, 211 aa, synthetic construct
  REGION 1..211: note = Variant of 3'O-kinase
MAFTIGLTGGIAAGKSTVSAMMRELGLPVIDADEAARAVMRPGEEAYRQIVAAFGPGILRADGEIDRQKLGAIRFSDEQQRKVLNAIVGPAVLKKMLAEKEAHIRSGAKTVVLDIPLLFESGLTHWVDKVLVVYVDDDVQLRRLMARNGFTEEEALKRIRSQWPSAEKVGRADAVIDNNGTIEETRRQLLAILHQWDLLGKGGSGHHHHHH

SEQ ID NO: 3827 - DNA, 639 bp, synthetic construct
  misc_feature 1..639: note = Variant of 3'O-kinase
  source 1..639: mol_type = other DNA
atggcgtttaccattggtttaacaggagggatcgcagcgggcaaatcgactgtgagtgccatgatgcgtgaactgggtctgccggtcatcgatgctgacgaggcagcacgcgccgttatgcgtccaggcgaagaagcttatcgccagattgtagctgcgttcggtccgggcattcttcgtgccgatggcgagatcgatcgccagaaactgggtgctatccgcttttcggacgaacaacaacgtaaggtgctgaatgcgattgtaggtcctgcagtcctgaagaagatgctcgctgagaaagaagctcatatccgctcaggcgccaagacggttgtgctggatatcccgctgctgttcgaatccggattgacccattgggtcgacaaagtgctcgtggtgtacgtcgatgatgatgttcagttacgccgccttatggcacgtaacgggtttactgatgaagaagctctgaagcgcattcgttcacagtggcccagtgcggagaaagttaaacgtgcagacgctgtcatcgacaataatggcacgattgaagaaacccgccgccagctgctggccattttacaccagtgggatctgctgggtaagggtggctccggccaccatcatcaccatcactaatga

SEQ ID NO: 3828 - protein, 211 aa, synthetic construct
  REGION 1..211: note = Variant of 3'O-kinase
MAFTIGLTGGIAAGKSTVSAMMRELGLPVIDADEAARAVMRPGEEAYRQIVAAFGPGILRADGEIDRQKLGAIRFSDEQQRKVLNAIVGPAVLKKMLAEKEAHIRSGAKTVVLDIPLLFESGLTHWVDKVLVVYVDDDVQLRRLMARNGFTDEEALKRIRSQWPSAEKVKRADAVIDNNGTIEETRRQLLAILHQWDLLGKGGSGHHHHHH

SEQ ID NO: 3829 - DNA, 639 bp, synthetic construct
  misc_feature 1..639: note = Variant of 3'O-kinase
  source 1..639: mol_type = other DNA
atggcgtttaccattggtttaacaggagggatcgcagcgggcaaatcgactgtgagtgccatgatgcgtgaactgggtctgccggtcatcgatgctgacgaggcagcacgcgccgttatgcgtccaggcgaagaagctaagcgccagattgtagctgcgttcggtccgggcattcttcgtgccgatggcgagatcgatcgccagaaactgggtgctatccgcttttcggacgaacaacaacgtaaggtgctgaatgcgattgtaggtcctgcagtcctgaagaagatgctcgctgagaaagaagctcatatccgctcaggcgccaagacggttgtgctggatatcccgctgctgttcgaatccggattgacccattgggtcgacaaagtgctcgtggtgtacgtcgatgatgatgttcagttacgccgccttatggcacgtaacgggtttactgaagaagaagctctgaagcgcattcgttcacagtggcccagtgcggagaaagttaaacgtgcagacgctgtcatcgacaataatggcacgattgaagaaacccgccgccagctgctggccattttacaccagtgggatctgctgggtaagggtggctccggccaccatcatcaccatcactaatga

SEQ ID NO: 3830 - protein, 211 aa, synthetic construct
  REGION 1..211: note = Variant of 3'O-kinase
MAFTIGLTGGIAAGKSTVSAMMRELGLPVIDADEAARAVMRPGEEAKRQIVAAFGPGILRADGEIDRQKLGAIRFSDEQQRKVLNAIVGPAVLKKMLAEKEAHIRSGAKTVVLDIPLLFESGLTHWVDKVLVVYVDDDVQLRRLMARNGFTEEEALKRIRSQWPSAEKVKRADAVIDNNGTIEETRRQLLAILHQWDLLGKGGSGHHHHHH

SEQ ID NO: 3831 - DNA, 639 bp, synthetic construct
  misc_feature 1..639: note = Variant of 3'O-kinase
  source 1..639: mol_type = other DNA
atggcgtttaccattggtttaacaggagggatcgcagcgggcaaatcgactgtgagtgccatgatgcgtgaactgggtctgaatgtcatcgatgctgacgaggcagcacgcgccgttatgcgtccaggcgaagaagcttatcgccagattgtagctgcgttcggtccgggcattcttcgtgccgatggcgagatcgatcgccagaaactgggtgctatccgcttttcggacgaacaacaacgtaaggtgctgaatgcgattgtaggtcctgcagtcctgaagaagatgctcgctgagaaagaagctcatatccgctcaggcgccaagacggttgtgctggatatcccgctgctgttcgaatccggattgacccattgggtcgacaaagtgctcgtggtgtacgtcgatgatgatgttcagttacgccgccttatggcacgtaacgggtttactgaagaagaagctctgaagcgcattcgttcacagtggcccagtgcggagaaagttaaacgtgcagacgctgtcatcgacaataatggcacgattgaagaaacccgccgccagctgctggccattttacaccagtgggatctgctgggtaagggtggctccggccaccatcatcaccatcactaatga

SEQ ID NO: 3832 - protein, 211 aa, synthetic construct
  REGION 1..211: note = Variant of 3'O-kinase
MAFTIGLTGGIAAGKSTVSAMMRELGLNVIDADEAARAVMRPGEEAYRQIVAAFGPGILRADGEIDRQKLGAIRFSDEQQRKVLNAIVGPAVLKKMLAEKEAHIRSGAKTVVLDIPLLFESGLTHWVDKVLVVYVDDDVQLRRLMARNGFTEEEALKRIRSQWPSAEKVKRADAVIDNNGTIEETRRQLLAILHQWDLLGKGGSGHHHHHH

SEQ ID NO: 3833 - DNA, 639 bp, synthetic construct
  misc_feature 1..639: note = Variant of 3'O-kinase
  source 1..639: mol_type = other DNA
atggcgtttaccattggtttaacaggagggatcgcagcgggcaaatcgactgtgagtgccatgatgcgtgaactgggtctgccggtcatcgatgctgacgaggcagcacgcgccgttatgcgtccaggcgaagaagcttatcgccagattgtagctgcgttcggtccgggcattcttcgtgccgatggcgagatcgatcgccagaaactgggtgctatccgcttttcggacgaacaacaacgtaaggtgctgaatgcgattgtaggtcctgcagtcctgaagaagatgctcgctgagaaagaagctcatatccgctcaggcgccaagacggttgtgctggatatcccgctgctgttcgaatccggattgacccattgggtcgacaaagtgctcgtggtgtacgtcgatgatgatgttcagttacgccgccttatggcacgtaacgggtttactgaagaagaagctctgaagcgcattcgttcacagtggcccagtgcggagaaagttaaacgtgcagacgctgtcatcgacaataatggcacgattgaagaaacccgccgccagctgctggccattttacaccagtgggatctgctgggtaagccgggctccggccaccatcatcaccatcactaatga

SEQ ID NO: 3834 - protein, 211 aa, synthetic construct
  REGION 1..211: note = Variant of 3'O-kinase
MAFTIGLTGGIAAGKSTVSAMMRELGLPVIDADEAARAVMRPGEEAYRQIVAAFGPGILRADGEIDRQKLGAIRFSDEQQRKVLNAIVGPAVLKKMLAEKEAHIRSGAKTVVLDIPLLFESGLTHWVDKVLVVYVDDDVQLRRLMARNGFTEEEALKRIRSQWPSAEKVKRADAVIDNNGTIEETRRQLLAILHQWDLLGKPGSGHHHHHH

SEQ ID NO: 3835 - DNA, 639 bp, synthetic construct
  misc_feature 1..639: note = Variant of 3'O-kinase
  source 1..639: mol_type = other DNA
atggcgtttaccattggtttaacaggagggatcgcagcgggcaaatcgactgtgagtgccatgatgcgtgaactgggtctgccggtcatcgatgctgacgaggcagcacgcgccgttatgcgtccaggcgaagaagcttatcgcgttattgtagctgcgttcggtccgggcattcttcgtgccgatggcgagatcgatcgccagaaactgggtgctatccgcttttcggacgaacaacaacgtaaggtgctgaatgcgattgtaggtcctgcagtcctgaagaagatgctcgctgagaaagaagctcatatccgctcaggcgccaagacggttgtgctggatatcccgctgctgttcgaatccggattgacccattgggtcgacaaagtgctcgtggtgtacgtcgatgatgatgttcagttacgccgccttatggcacgtaacgggtttactgaagaagaagctctgaagcgcattcgttcacagtggcccagtgcggagaaagttaaacgtgcagacgctgtcatcgacaataatggcacgattgaagaaacccgccgccagctgctggccattttacaccagtgggatctgctgggtaagggtggctccggccaccatcatcaccatcactaatga

SEQ ID NO: 3836 - protein, 211 aa, synthetic construct
  REGION 1..211: note = Variant of 3'O-kinase
MAFTIGLTGGIAAGKSTVSAMMRELGLPVIDADEAARAVMRPGEEAYRVIVAAFGPGILRADGEIDRQKLGAIRFSDEQQRKVLNAIVGPAVLKKMLAEKEAHIRSGAKTVVLDIPLLFESGLTHWVDKVLVVYVDDDVQLRRLMARNGFTEEEALKRIRSQWPSAEKVKRADAVIDNNGTIEETRRQLLAILHQWDLLGKGGSGHHHHHH

SEQ ID NO: 3837 - DNA, 639 bp, synthetic construct
  misc_feature 1..639: note = Variant of 3'O-kinase
  source 1..639: mol_type = other DNA
atggcgtttaccattggtttaacaggagggatcgcagcgggcaaatcgactgtgagtgccatgatgcgtgaactgggtctgccggtcatcgatgctgacgaggcagcacgcgccgttatgcgtccaggcgaagaagcttatcgccagattgtagctgcgttcggtccgggcattcttcgtgccgatggcgagatcgatcgccagaaactgggtgctatccgcttttcggacgaacaacaacgtaaggtgctgaatgcgattgtaggtcctgcagtcctgaagaagatgctcgctgagaaagaagctcatatccgctcaggcgccaagacggttgtgctggatatcccgctgctgttcgaatccggattgacccattgggtcgactctgtgctcgtggtgtacgtcgatgatgatgttcagttacgccgccttatggcacgtaacgggtttactgaagaagaagctctgaagcgcattcgttcacagtggcccagtgcggagaaagttaaacgtgcagacgctgtcatcgacaataatggcacgattgaagaaacccgccgccagctgctggccattttacaccagtgggatctgctgggtaagggtggctccggccaccatcatcaccatcactaatga

SEQ ID NO: 3838 - protein, 211 aa, synthetic construct
  REGION 1..211: note = Variant of 3'O-kinase
MAFTIGLTGGIAAGKSTVSAMMRELGLPVIDADEAARAVMRPGEEAYRQIVAAFGPGILRADGEIDRQKLGAIRFSDEQQRKVLNAIVGPAVLKKMLAEKEAHIRSGAKTVVLDIPLLFESGLTHWVDSVLVVYVDDDVQLRRLMARNGFTEEEALKRIRSQWPSAEKVKRADAVIDNNGTIEETRRQLLAILHQWDLLGKGGSGHHHHHH

SEQ ID NO: 3839 - DNA, 639 bp, synthetic construct
  misc_feature 1..639: note = Variant of 3'O-kinase
  source 1..639: mol_type = other DNA
atggcgtttaccattggtttaacaggagggatcgcagcgggcaaatcgactgtgagtgccatgatgcgtgaactgggtctgccggtcatcgatgctgacgaggcagcacgcgccgttatgcgtccaggcgaagaagcttatcgccagattgtagctgcgttcggtccgggcattcttcgtgccgatggcgagatcgatcgccagaaactgggtgctatccgcttttcggacgaacaacaacgtaaggtgctgaatgcgattgtaggtcctgcagtcctgaagaagatgctcgctgagaaagaagctcatatccgctcaggcgccaagacggttgtgctggatatcccgctgctgttcgaatccggattgacccattgggtcgacaaagtgctcgtggtgtacgtcgatgatgatgttcagttacgccgccttatggcacgtaacgggtttactgaagaagaagctctgaagcgcattcgttcacagtggcccagtgcggagaaagttaaacgtgcagacgctgtcatcgacaataatggcacgattgaagaaacccgccgccagctgctggccattttacaccagtgggatctgctgggtaagattggctccggccaccatcatcaccatcactaatga

SEQ ID NO: 3840 - protein, 211 aa, synthetic construct
  REGION 1..211: note = Variant of 3'O-kinase
MAFTIGLTGGIAAGKSTVSAMMRELGLPVIDADEAARAVMRPGEEAYRQIVAAFGPGILRADGEIDRQKLGAIRFSDEQQRKVLNAIVGPAVLKKMLAEKEAHIRSGAKTVVLDIPLLFESGLTHWVDKVLVVYVDDDVQLRRLMARNGFTEEEALKRIRSQWPSAEKVKRADAVIDNNGTIEETRRQLLAILHQWDLLGKIGSGHHHHHH

SEQ ID NO: 3841 - DNA, 639 bp, synthetic construct
  misc_feature 1..639: note = Variant of 3'O-kinase
  source 1..639: mol_type = other DNA
atggcgtttaccattggtttaacaggagggatcgcagcgggcaaatcgactgtgagtgccatgatgcgtgaactgggtctgccggtcatcgatgctgacgaggcagcacgcgccgttatgcgtccaggcgaagaagcttatcgccagattgtagctgcgttcggtccgggcattcttcgtgccgatggcgagatcgatcgccagaaactgggtgctatccgcttttcggacgaacaacaacgtaaggtgctgaatgcgattgtaggtcctgcagtcctgaagaagatgctcgctgagaaagaagctcatatccgctcaggcgccaagacggttgtgctggatatcccgctgctgttcgaatccggattgacccattgggtcgacaaagtgctcgtggtgtacgtcgatgatgatgttcagttacgccgccttatggcacgtaacgggtttactgaagaagaagctctgaagcgcattcgttcacagtggcccagtgcggagaaagttaaacgtgcagacgctgtcatcgacaataatggcacgattgaagaaacccgccgccagctgctggccattttacaccagtgggtgctgctgggtaagggtggctccggccaccatcatcaccatcactaatga

SEQ ID NO: 3842 - protein, 211 aa, synthetic construct
  REGION 1..211: note = Variant of 3'O-kinase
MAFTIGLTGGIAAGKSTVSAMMRELGLPVIDADEAARAVMRPGEEAYRQIVAAFGPGILRADGEIDRQKLGAIRFSDEQQRKVLNAIVGPAVLKKMLAEKEAHIRSGAKTVVLDIPLLFESGLTHWVDKVLVVYVDDDVQLRRLMARNGFTEEEALKRIRSQWPSAEKVKRADAVIDNNGTIEETRRQLLAILHQWVLLGKGGSGHHHHHH

SEQ ID NO: 3843 - DNA, 639 bp, synthetic construct
  misc_feature 1..639: note = Variant of 3'O-kinase
  source 1..639: mol_type = other DNA
atggcgtttaccattggtttaacaggagggatcgcagcgggctcttcgactgtgagtgccatgatgcgtgaactgggtctgccggtcatcgatgctgacgaggcagcacgcgccgttatgcgtccaggcgaagaagcttatcgccagattgtagctgcgttcggtccgggcattcttcgtgccgatggcgagatcgatcgccagaaactgggtgctatccgcttttcggacgaacaacaacgtaaggtgctgaatgcgattgtaggtcctgcagtcctgaagaagatgctcgctgagaaagaagctcatatccgctcaggcgccaagacggttgtgctggatatcccgctgctgttcgaatccggattgacccattgggtcgacaaagtgctcgtggtgtacgtcgatgatgatgttcagttacgccgccttatggcacgtaacgggtttactgaagaagaagctctgaagcgcattcgttcacagtggcccagtgcggagaaagttaaacgtgcagacgctgtcatcgacaataatggcacgattgaagaaacccgccgccagctgctggccattttacaccagtgggatctgctgggtaagggtggctccggccaccatcatcaccatcactaatga

SEQ ID NO: 3844 - protein, 211 aa, synthetic construct
  REGION 1..211: note = Variant of 3'O-kinase
MAFTIGLTGGIAAGSSTVSAMMRELGLPVIDADEAARAVMRPGEEAYRQIVAAFGPGILRADGEIDRQKLGAIRFSDEQQRKVLNAIVGPAVLKKMLAEKEAHIRSGAKTVVLDIPLLFESGLTHWVDKVLVVYVDDDVQLRRLMARNGFTEEEALKRIRSQWPSAEKVKRADAVIDNNGTIEETRRQLLAILHQWDLLGKGGSGHHHHHH

SEQ ID NO: 3845 - DNA, 639 bp, synthetic construct
  misc_feature 1..639: note = Variant of 3'O-kinase
  source 1..639: mol_type = other DNA
atggcgtttaccattggtttaacaggagggatcgcagcgggcaaatcgactgtgagtgccatgatgcgtgaactgggtctgccggtcatcgatgctgacgaggcagcacgcgccgttatgcgtccaggcgaagaagcttatcgccagattgtagctgcgttcggtccgggcattcttcgtgccgatggcgagatcgatcgccagaaactgggtgctatccgcttttcggacgaacaacaacgtaaggtgctgaatgcgattgtaggtcctgcagtcctgaagaagatgctcgctgagagtgaagctcatatccgctcaggcgccaagacggttgtgctggatatcccgctgctgttcgaatccggattgacccattgggtcgacaaagtgctcgtggtgtacgtcgatgatgatgttcagttacgccgccttatggcacgtaacgggtttactgaagaagaagctctgaagcgcattcgttcacagtggcccagtgcggagaaagttaaacgtgcagacgctgtcatcgacaataatggcacgattgaagaaacccgccgccagctgctggccattttacaccagtgggatctgctgggtaagggtggctccggccaccatcatcaccatcactaatga

SEQ ID NO: 3846 - protein, 211 aa, synthetic construct
  REGION 1..211: note = Variant of 3'O-kinase
MAFTIGLTGGIAAGKSTVSAMMRELGLPVIDADEAARAVMRPGEEAYRQIVAAFGPGILRADGEIDRQKLGAIRFSDEQQRKVLNAIVGPAVLKKMLAESEAHIRSGAKTVVLDIPLLFESGLTHWVDKVLVVYVDDDVQLRRLMARNGFTEEEALKRIRSQWPSAEKVKRADAVIDNNGTIEETRRQLLAILHQWDLLGKGGSGHHHHHH

SEQ ID NO: 3847 - DNA, 639 bp, synthetic construct
  misc_feature 1..639: note = Variant of 3'O-kinase
  source 1..639: mol_type = other DNA
atggcgtttaccattggtttaacaggagggatcgcagcgggcaaatcgactgtgagtgccatgatgcgtgaactgggtctgccggtcatcgatgctgacgaggcagcacgcgccgttatgcgtccaggcgaagaagcttatcgccagattgtagctgcgttcggtccgggcattcttcgtgccgatggcgagatcgatcgccagaaactgggtgctatccgcttttcggacgaacaacaacgtaaggtgctgaatgcgattgtaggtcctgcagtcctgaagaagatgctcgctgagaaagaagctcatatcgagtcaggcgccaagacggttgtgctggatatcccgctgctgttcgaatccggattgacccattgggtcgacaaagtgctcgtggtgtacgtcgatgatgatgttcagttacgccgccttatggcacgtaacgggtttactgaagaagaagctctgaagcgcattcgttcacagtggcccagtgcggagaaagttaaacgtgcagacgctgtcatcgacaataatggcacgattgaagaaacccgccgccagctgctggccattttacaccagtgggatctgctgggtaagggtggctccggccaccatcatcaccatcactaatga

SEQ ID NO: 3848 - protein, 211 aa, synthetic construct
  REGION 1..211: note = Variant of 3'O-kinase
MAFTIGLTGGIAAGKSTVSAMMRELGLPVIDADEAARAVMRPGEEAYRQIVAAFGPGILRADGEIDRQKLGAIRFSDEQQRKVLNAIVGPAVLKKMLAEKEAHIESGAKTVVLDIPLLFESGLTHWVDKVLVVYVDDDVQLRRLMARNGFTEEEALKRIRSQWPSAEKVKRADAVIDNNGTIEETRRQLLAILHQWDLLGKGGSGHHHHHH

SEQ ID NO: 3849 - DNA, 639 bp, synthetic construct
  misc_feature 1..639: note = Variant of 3'O-kinase
  source 1..639: mol_type = other DNA
atggcgtttaccattggtttaacaggagggatcgcagcgggcaaatcgactgtgagtgccatgatgcgtgaactgggtctgccggtcatcgatgctgacgaggcagcacgcgccgttatgcgtccaggcgaagaagcttatcgccagattgtagctgcgttcggtccgggcattcttcgtgccgatggcgagatcgatcgccagaaactgggtgctatccgcttttcggacgaacaacaacgtaaggtgctgcctgcgattgtaggtcctgcagtcctgaagaagatgctcgctgagaaagaagctcatatccgctcaggcgccaagacggttgtgctggatatcccgctgctgttcgaatccggattgacccattgggtcgacaaagtgctcgtggtgtacgtcgatgatgatgttcagttacgccgccttatggcacgtaacgggtttactgaagaagaagctctgaagcgcattcgttcacagtggcccagtgcggagaaagttaaacgtgcagacgctgtcatcgacaataatggcacgattgaagaaacccgccgccagctgctggccattttacaccagtgggatctgctgggtaagggtggctccggccaccatcatcaccatcactaatga

SEQ ID NO: 3850 - protein, 211 aa, synthetic construct
  REGION 1..211: note = Variant of 3'O-kinase
MAFTIGLTGGIAAGKSTVSAMMRELGLPVIDADEAARAVMRPGEEAYRQIVAAFGPGILRADGEIDRQKLGAIRFSDEQQRKVLPAIVGPAVLKKMLAEKEAHIRSGAKTVVLDIPLLFESGLTHWVDKVLVVYVDDDVQLRRLMARNGFTEEEALKRIRSQWPSAEKVKRADAVIDNNGTIEETRRQLLAILHQWDLLGKGGSGHHHHHH

SEQ ID NO: 3851 - DNA, 639 bp, synthetic construct
  misc_feature 1..639: note = Variant of 3'O-kinase
  source 1..639: mol_type = other DNA
atggcgtttaccattggtttaacaggagggatcgcagcgggcaaatcgactgtgagtgccatgatgcgtgaactgggtctgccggtcatcgatgctgacgaggcagcacgcgccgttatgcgtccaggcgaagaagcttatcgccagattgtagctgcgttcggtccgggcattcttcgtgccgatggcgagatcgatcgccagaaactgggtgctatccgcttttcggacgaacaacaacgtaaggtgctgaatgcgattgtaggtcctgcagtcctgaagaagatgctcgctgagaaagaagctcatatccgctcaggcgccaagacggttgtgctggatatcccgctgctgttcgaatccggattgacccattgggtcgacaaagtgctcgtggtgtacgtcgatgatgatgttcagttatatcgccttatggcacgtaacgggtttactgaagaagaagctctgaagcgcattcgttcacagtggcccagtgcggagaaagttaaacgtgcagacgctgtcatcgacaataatggcacgattgaagaaacccgccgccagctgctggccattttacaccagtgggatctgctgggtaagggtggctccggccaccatcatcaccatcactaatga

SEQ ID NO: 3852 - protein, 211 aa, synthetic construct
  REGION 1..211: note = Variant of 3'O-kinase
MAFTIGLTGGIAAGKSTVSAMMRELGLPVIDADEAARAVMRPGEEAYRQIVAAFGPGILRADGEIDRQKLGAIRFSDEQQRKVLNAIVGPAVLKKMLAEKEAHIRSGAKTVVLDIPLLFESGLTHWVDKVLVVYVDDDVQLYRLMARNGFTEEEALKRIRSQWPSAEKVKRADAVIDNNGTIEETRRQLLAILHQWDLLGKGGSGHHHHHH

SEQ ID NO: 3853 - DNA, 639 bp, synthetic construct
  misc_feature 1..639: note = Variant of 3'O-kinase
  source 1..639: mol_type = other DNA
atggcgtttaccattggtttaacaggagggatcgcagcgggcaaatcgactgtgagtgccatgatgcgtgaactgggtctgccggtcatcgatgctgacgaggcagcacgcgccgttatgcgtccaggcgaagaagcttatcgccagattgtagctgcgttcggtccgggcattcttcgtgccgatggcgagatcgatcgccagaaactgggtgctatccgcttttcggacgaacaacaacgtaaggtgctgaatgcgattgtaggtcctgcagtcctgtgtaagatgctcgctgagaaagaagctcatatccgctcaggcgccaagacggttgtgctggatatcccgctgctgttcgaatccggattgacccattgggtcgacaaagtgctcgtggtgtacgtcgatgatgatgttcagttacgccgccttatggcacgtaacgggtttactgaagaagaagctctgaagcgcattcgttcacagtggcccagtgcggagaaagttaaacgtgcagacgctgtcatcgacaataatggcacgattgaagaaacccgccgccagctgctggccattttacaccagtgggatctgctgggtaagggtggctccggccaccatcatcaccatcactaatga

SEQ ID NO: 3854 - protein, 211 aa, synthetic construct
  REGION 1..211: note = Variant of 3'O-kinase
MAFTIGLTGGIAAGKSTVSAMMRELGLPVIDADEAARAVMRPGEEAYRQIVAAFGPGILRADGEIDRQKLGAIRFSDEQQRKVLNAIVGPAVLCKMLAEKEAHIRSGAKTVVLDIPLLFESGLTHWVDKVLVVYVDDDVQLRRLMARNGFTEEEALKRIRSQWPSAEKVKRADAVIDNNGTIEETRRQLLAILHQWDLLGKGGSGHHHHHH

SEQ ID NO: 3855 - DNA, 639 bp, synthetic construct
  misc_feature 1..639: note = Variant of 3'O-kinase
  source 1..639: mol_type = other DNA
atggcgtttaccattggtttaacaggagggatcgcagcgggcaaatcgactgtgagtgccatgatgcgtgaactgggtctgccggtcatcgatgctgacgaggcagcacgcgccgttatgcgtccaggcgatgaagcttatcgccagattgtagctgcgttcggtccgggcattcttcgtgccgatggcgagatcgatcgccagaaactgggtgctatccgcttttcggacgaacaacaacgtaaggtgctgaatgcgattgtaggtcctgcagtcctgaagaagatgctcgctgagaaagaagctcatatccgctcaggcgccaagacggttgtgctggatatcccgctgctgttcgaatccggattgacccattgggtcgacaaagtgctcgtggtgtacgtcgatgatgatgttcagttacgccgccttatggcacgtaacgggtttactgaagaagaagctctgaagcgcattcgttcacagtggcccagtgcggagaaagttaaacgtgcagacgctgtcatcgacaataatggcacgattgaagaaacccgccgccagctgctggccattttacaccagtgggatctgctgggtaagggtggctccggccaccatcatcaccatcactaatga

SEQ ID NO: 3856 - protein, 211 aa, synthetic construct
  REGION 1..211: note = Variant of 3'O-kinase
MAFTIGLTGGIAAGKSTVSAMMRELGLPVIDADEAARAVMRPGDEAYRQIVAAFGPGILRADGEIDRQKLGAIRFSDEQQRKVLNAIVGPAVLKKMLAEKEAHIRSGAKTVVLDIPLLFESGLTHWVDKVLVVYVDDDVQLRRLMARNGFTEEEALKRIRSQWPSAEKVKRADAVIDNNGTIEETRRQLLAILHQWDLLGKGGSGHHHHHH

SEQ ID NO: 3857 - DNA, 639 bp, synthetic construct
  misc_feature 1..639: note = Variant of 3'O-kinase
  source 1..639: mol_type = other DNA
atggcgtttggtattggtttaacaggagggatcgcagcgggcaaatcgactgtgagtgccatgatgcgtgaactgggtctgccggtcatcgatgctgacgaggcagcacgcgccgttatgcgtccaggcgaagaagcttatcgccagattgtagctgcgttcggtccgggcattcttcgtgccgatggcgagatcgatcgccagaaactgggtgctatccgcttttcggacgaacaacaacgtaaggtgctgaatgcgattgtaggtcctgcagtcctgaagaagatgctcgctgagaaagaagctcatatccgctcaggcgccaagacggttgtgctggatatcccgctgctgttcgaatccggattgacccattgggtcgacaaagtgctcgtggtgtacgtcgatgatgatgttcagttacgccgccttatggcacgtaacgggtttactgaagaagaagctctgaagcgcattcgttcacagtggcccagtgcggagaaagttaaacgtgcagacgctgtcatcgacaataatggcacgattgaagaaacccgccgccagctgctggccattttacaccagtgggatctgctgggtaagggtggctccggccaccatcatcaccatcactaatga

SEQ ID NO: 3858 - protein, 211 aa, synthetic construct
  REGION 1..211: note = Variant of 3'O-kinase
MAFGIGLTGGIAAGKSTVSAMMRELGLPVIDADEAARAVMRPGEEAYRQIVAAFGPGILRADGEIDRQKLGAIRFSDEQQRKVLNAIVGPAVLKKMLAEKEAHIRSGAKTVVLDIPLLFESGLTHWVDKVLVVYVDDDVQLRRLMARNGFTEEEALKRIRSQWPSAEKVKRADAVIDNNGTIEETRRQLLAILHQWDLLGKGGSGHHHHHH

SEQ ID NO: 3859 - DNA, 639 bp, synthetic construct
  misc_feature 1..639: note = Variant of 3'O-kinase
  source 1..639: mol_type = other DNA
atggcgtttaccattggtttaacaggagggatcgcagcgggcaaatcgactgtgagtgccatgatgcgtgaactgggtctgccggtcatcgatgctgacgaggcagcacgcgccgttatgcgtccaggcgaagaagcttatcgccagattgtagctgcgttcggtccgggcattcttcgtgccgatggcgagatcgatcgccagaaactgggtgctatccgcttttcggacgaacaacaacgtaaggtgctgaatgcgattgtaggtcctgcagtcctgaagaagatgctcgctgagaaagaagctcatatccgctcaggcgccaagacggttgtgctggatatcccgctgctgttcgaatccggattgacccattgggtcgacaaagtgctcgtggtgtacgtcgatgatgatgttcagttacgccgccttatggcacgtaacgggtttactgaagaagaagctctgaagcgcattcgttcacagtggcccagtgcggagaaagttaaaggggcagacgctgtcatcgacaataatggcacgattgaagaaacccgccgccagctgctggccattttacaccagtgggatctgctgggtaagggtggctccggccaccatcatcaccatcactaatga

SEQ ID NO: 3860 - protein, 211 aa, synthetic construct
  REGION 1..211: note = Variant of 3'O-kinase
MAFTIGLTGGIAAGKSTVSAMMRELGLPVIDADEAARAVMRPGEEAYRQIVAAFGPGILRADGEIDRQKLGAIRFSDEQQRKVLNAIVGPAVLKKMLAEKEAHIRSGAKTVVLDIPLLFESGLTHWVDKVLVVYVDDDVQLRRLMARNGFTEEEALKRIRSQWPSAEKVKGADAVIDNNGTIEETRRQLLAILHQWDLLGKGGSGHHHHHH

SEQ ID NO: 3861 - DNA, 639 bp, synthetic construct
  misc_feature 1..639: note = Variant of 3'O-kinase
  source 1..639: mol_type = other DNA
atggcgtttaccattggtttaacaggagggatcgcagcgggcaaatcgactgtgagtgccatgatgcgtgaactgggtctgccggtcatcgatgctgacgaggcagcacgcgccgttatgcgtccaggcgaagaagcttatcgccagattgtagctgcgttcggtccgggcattcttcgtgccgatagtgagatcgatcgccagaaactgggtgctatccgcttttcggacgaacaacaacgtaaggtgctgaatgcgattgtaggtcctgcagtcctgaagaagatgctcgctgagaaagaagctcatatccgctcaggcgccaagacggttgtgctggatatcccgctgctgttcgaatccggattgacccattgggtcgacaaagtgctcgtggtgtacgtcgatgatgatgttcagttacgccgccttatggcacgtaacgggtttactgaagaagaagctctgaagcgcattcgttcacagtggcccagtgcggagaaagttaaacgtgcagacgctgtcatcgacaataatggcacgattgaagaaacccgccgccagctgctggccattttacaccagtgggatctgctgggtaagggtggctccggccaccatcatcaccatcactaatga

SEQ ID NO: 3862 - protein, 211 aa, synthetic construct
  REGION 1..211: note = Variant of 3'O-kinase
MAFTIGLTGGIAAGKSTVSAMMRELGLPVIDADEAARAVMRPGEEAYRQIVAAFGPGILRADSEIDRQKLGAIRFSDEQQRKVLNAIVGPAVLKKMLAEKEAHIRSGAKTVVLDIPLLFESGLTHWVDKVLVVYVDDDVQLRRLMARNGFTEEEALKRIRSQWPSAEKVKRADAVIDNNGTIEETRRQLLAILHQWDLLGKGGSGHHHHHH

SEQ ID NO: 3863 - DNA, 639 bp, synthetic construct
  misc_feature 1..639: note = Variant of 3'O-kinase
  source 1..639: mol_type = other DNA
atggcgtttaccattggtttaacaggagggatcgcagcgggcaaatcgactgtgagtgccatgatgcgtgaactgggtctgccggtcatcgatgctgacgaggcagcacgcgccgttatgcgtccaggcgaagaagcttatcgccagattgtagctgcgttcggtccgggcattcttcgtgccgatggcgagatcgatcgccagaaactgggtgctatccgcttttcggacgaacaacaacgtaaggtgctgaatgcgattgtaggtcctgcagtcctgaagaagatgctcgctgagaaagaagctcatatcagttcaggcgccaagacggttgtgctggatatcccgctgctgttcgaatccggattgacccattgggtcgacaaagtgctcgtggtgtacgtcgatgatgatgttcagttacgccgccttatggcacgtaacgggtttactgaagaagaagctctgaagcgcattcgttcacagtggcccagtgcggagaaagttaaacgtgcagacgctgtcatcgacaataatggcacgattgaagaaacccgccgccagctgctggccattttacaccagtgggatctgctgggtaagggtggctccggccaccatcatcaccatcactaatga

SEQ ID NO: 3864 - protein, 211 aa, synthetic construct
  REGION 1..211: note = Variant of 3'O-kinase
MAFTIGLTGGIAAGKSTVSAMMRELGLPVIDADEAARAVMRPGEEAYRQIVAAFGPGILRADGEIDRQKLGAIRFSDEQQRKVLNAIVGPAVLKKMLAEKEAHISSGAKTVVLDIPLLFESGLTHWVDKVLVVYVDDDVQLRRLMARNGFTEEEALKRIRSQWPSAEKVKRADAVIDNNGTIEETRRQLLAILHQWDLLGKGGSGHHHHHH

SEQ ID NO: 3865 - DNA, 639 bp, synthetic construct
  misc_feature 1..639: note = Variant of 3'O-kinase
  source 1..639: mol_type = other DNA
atggcgtttaccattggtttaacaggagggatcgcagcgggcaaatcgactgtgagtgccatgatgcgtgaactgggtctgccggtcatcgatgctgacgaggcagcacgcgccgttatgcgtccaggcgaagaagcttatcgccagattgtagctgcgttcggtccgtgtattcttcgtgccgatggcgagatcgatcgccagaaactgggtgctatccgcttttcggacgaacaacaacgtaaggtgctgaatgcgattgtaggtcctgcagtcctgaagaagatgctcgctgagaaagaagctcatatccgctcaggcgccaagacggttgtgctggatatcccgctgctgttcgaatccggattgacccattgggtcgacaaagtgctcgtggtgtacgtcgatgatgatgttcagttacgccgccttatggcacgtaacgggtttactgaagaagaagctctgaagcgcattcgttcacagtggcccagtgcggagaaagttaaacgtgcagacgctgtcatcgacaataatggcacgattgaagaaacccgccgccagctgctggccattttacaccagtgggatctgctgggtaagggtggctccggccaccatcatcaccatcactaatga

SEQ ID NO: 3866 - protein, 211 aa, synthetic construct
  REGION 1..211: note = Variant of 3'O-kinase
MAFTIGLTGGIAAGKSTVSAMMRELGLPVIDADEAARAVMRPGEEAYRQIVAAFGPCILRADGEIDRQKLGAIRFSDEQQRKVLNAIVGPAVLKKMLAEKEAHIRSGAKTVVLDIPLLFESGLTHWVDKVLVVYVDDDVQLRRLMARNGFTEEEALKRIRSQWPSAEKVKRADAVIDNNGTIEETRRQLLAILHQWDLLGKGGSGHHHHHH

SEQ ID NO: 3867 - DNA, 639 bp, synthetic construct
  misc_feature 1..639: note = Variant of 3'O-kinase
  source 1..639: mol_type = other DNA
atggcgtttaccattggtttaacaggagggatcgcagcgggcaaatcgactgtgagtgccatgatgcgtgaactgggtctgccggtcatcgatgctgacgaggcagcacgcgccgttatgcgtccaggcgaagaagcttatcgccagattgtagctgcgttcggtccgggcattcttcgtgccgatggcgagatcgatcgccagaaactgggtgctatccgcttttcggacgaacaacaacgtaaggtgctgaatgcgattgtaggtcctgcagtcctgaagaagatgctcgctgagaaagaagctcatatcgggtcaggcgccaagacggttgtgctggatatcccgctgctgttcgaatccggattgacccattgggtcgacaaagtgctcgtggtgtacgtcgatgatgatgttcagttacgccgccttatggcacgtaacgggtttactgaagaagaagctctgaagcgcattcgttcacagtggcccagtgcggagaaagttaaacgtgcagacgctgtcatcgacaataatggcacgattgaagaaacccgccgccagctgctggccattttacaccagtgggatctgctgggtaagggtggctccggccaccatcatcaccatcactaatga

SEQ ID NO: 3868 - protein, 211 aa, synthetic construct
  REGION 1..211: note = Variant of 3'O-kinase
MAFTIGLTGGIAAGKSTVSAMMRELGLPVIDADEAARAVMRPGEEAYRQIVAAFGPGILRADGEIDRQKLGAIRFSDEQQRKVLNAIVGPAVLKKMLAEKEAHIGSGAKTVVLDIPLLFESGLTHWVDKVLVVYVDDDVQLRRLMARNGFTEEEALKRIRSQWPSAEKVKRADAVIDNNGTIEETRRQLLAILHQWDLLGKGGSGHHHHHH

SEQ ID NO: 3869 - DNA, 639 bp, synthetic construct
  misc_feature 1..639: note = Variant of 3'O-kinase
  source 1..639: mol_type = other DNA
atggcgtttaccattggtttaacaggagggatcgcagcgggcaaatcgactgtgagtgccatgatgcgtgaactgggtctgccggtcatcgatgctgacgaggcagcacgcgccgttatgcgtccaggcgaagaagcttatcgccagattgtagctgcgttcggtccgggcattcttcgtgccgatggcgagatcgatcgccagaaactgggtgctatccgcttttcggacgaacaacaacgtaaggtgctgaatgcgattgtaggtcctgcagtcctgaagaagatgctcgctgagaaagaagctcatatccgctcaggcgccaagacggttgtgctggatatcccgctgctgttcgaatccggattgacccattgggtcgacaaagtgctcgtggtgtacgtcgatgatgatgttcagttacgccgccttatggcacgtaacccgtttactgaagaagaagctctgaagcgcattcgttcacagtggcccagtgcggagaaagttaaacgtgcagacgctgtcatcgacaataatggcacgattgaagaaacccgccgccagctgctggccattttacaccagtgggatctgctgggtaagggtggctccggccaccatcatcaccatcactaatga

SEQ ID NO: 3870 - protein, 211 aa, synthetic construct
  REGION 1..211: note = Variant of 3'O-kinase
MAFTIGLTGGIAAGKSTVSAMMRELGLPVIDADEAARAVMRPGEEAYRQIVAAFGPGILRADGEIDRQKLGAIRFSDEQQRKVLNAIVGPAVLKKMLAEKEAHIRSGAKTVVLDIPLLFESGLTHWVDKVLVVYVDDDVQLRRLMARNPFTEEEALKRIRSQWPSAEKVKRADAVIDNNGTIEETRRQLLAILHQWDLLGKGGSGHHHHHH

SEQ ID NO: 3871 - DNA, 639 bp, synthetic construct
  misc_feature 1..639: note = Variant of 3'O-kinase
  source 1..639: mol_type = other DNA
atggcgtttaccattggtttaacaggagggatcgcagcgggcaaatcgactgtgagtgccatgatgcgtgaactgggtctgccggtcatcgatgctgacgaggcagcacgcgccgttatgcgtccaggcgaagaagcttatcgccaggaggtagctgcgttcggtccgggcattcttcgtgccgatggcgagatcgatcgccagaaactgggtgctatccgcttttcggacgaacaacaacgtaaggtgctgaatgcgattgtaggtcctgcagtcctgaagaagatgctcgctgagaaagaagctcatatccgctcaggcgccaagacggttgtgctggatatcccgctgctgttcgaatccggattgacccattgggtcgacaaagtgctcgtggtgtacgtcgatgatgatgttcagttacgccgccttatggcacgtaacgggtttactgaagaagaagctctgaagcgcattcgttcacagtggcccagtgcggagaaagttaaacgtgcagacgctgtcatcgacaataatggcacgattgaagaaacccgccgccagctgctggccattttacaccagtgggatctgctgggtaagggtggctccggccaccatcatcaccatcactaatga

SEQ ID NO: 3872 - protein, 211 aa, synthetic construct
  REGION 1..211: note = Variant of 3'O-kinase
MAFTIGLTGGIAAGKSTVSAMMRELGLPVIDADEAARAVMRPGEEAYRQEVAAFGPGILRADGEIDRQKLGAIRFSDEQQRKVLNAIVGPAVLKKMLAEKEAHIRSGAKTVVLDIPLLFESGLTHWVDKVLVVYVDDDVQLRRLMARNGFTEEEALKRIRSQWPSAEKVKRADAVIDNNGTIEETRRQLLAILHQWDLLGKGGSGHHHHHH

SEQ ID NO: 3873 - DNA, 639 bp, synthetic construct
  misc_feature 1..639: note = Variant of 3'O-kinase
  source 1..639: mol_type = other DNA
atggcgtttgtgattggtttaacaggagggatcgcagcgggcaaatcgactgtgagtgccatgatgcgtgaactgggtctgccggtcatcgatgctgacgaggcagcacgcgccgttatgcgtccaggcgaagaagcttatcgccagattgtagctgcgttcggtccgggcattcttcgtgccgatggcgagatcgatcgccagaaactgggtgctatccgcttttcggacgaacaacaacgtaaggtgctgaatgcgattgtaggtcctgcagtcctgaagaagatgctcgctgagaaagaagctcatatccgctcaggcgccaagacggttgtgctggatatcccgctgctgttcgaatccggattgacccattgggtcgacaaagtgctcgtggtgtacgtcgatgatgatgttcagttacgccgccttatggcacgtaacgggtttactgaagaagaagctctgaagcgcattcgttcacagtggcccagtgcggagaaagttaaacgtgcagacgctgtcatcgacaataatggcacgattgaagaaacccgccgccagctgctggccattttacaccagtgggatctgctgggtaagggtggctccggccaccatcatcaccatcactaatga

SEQ ID NO: 3874 - protein, 211 aa, synthetic construct
  REGION 1..211: note = Variant of 3'O-kinase
MAFVIGLTGGIAAGKSTVSAMMRELGLPVIDADEAARAVMRPGEEAYRQIVAAFGPGILRADGEIDRQKLGAIRFSDEQQRKVLNAIVGPAVLKKMLAEKEAHIRSGAKTVVLDIPLLFESGLTHWVDKVLVVYVDDDVQLRRLMARNGFTEEEALKRIRSQWPSAEKVKRADAVIDNNGTIEETRRQLLAILHQWDLLGKGGSGHHHHHH

SEQ ID NO: 3875 - DNA, 639 bp, synthetic construct
  misc_feature 1..639: note = Variant of 3'O-kinase
  source 1..639: mol_type = other DNA
atggcgtttaccattggtttaacaggagggatcgcagcgggcaaatcgactgtgagtgccatgatgcgtgaactgggtctgccggtcatcgatgctgacgaggcagcacgcgccgttatgcgtccaggcgaagaagcttatcgccagattgtagctgcgttcggtccgggcattcttcgtgccgatggcgagatcgatcgccagaaactgggtgctatccgcttttcggacgaacaacaacgtaaggtgctgaatgcgattgtaggtcctgcagtcctgaagaagatgctcgctgagaaagaagctcatatccgctcaggcgccaagacggttgtgctggatatcccgctgctgttcgaatccggattgacccattgggtcgacaaagtgctcgtggtgtacgtcgatgatgatgttcagttacgccgccttatggcacgtaacgggtttactgaagaagaagctctgaagcgcattcgttcacagtggcccagtgcggagaaagttaaactggcagacgctgtcatcgacaataatggcacgattgaagaaacccgccgccagctgctggccattttacaccagtgggatctgctgggtaagggtggctccggccaccatcatcaccatcactaatga

SEQ ID NO: 3876 - protein, 211 aa, synthetic construct
  REGION 1..211: note = Variant of 3'O-kinase
MAFTIGLTGGIAAGKSTVSAMMRELGLPVIDADEAARAVMRPGEEAYRQIVAAFGPGILRADGEIDRQKLGAIRFSDEQQRKVLNAIVGPAVLKKMLAEKEAHIRSGAKTVVLDIPLLFESGLTHWVDKVLVVYVDDDVQLRRLMARNGFTEEEALKRIRSQWPSAEKVKLADAVIDNNGTIEETRRQLLAILHQWDLLGKGGSGHHHHHH

SEQ ID NO: 3877 - DNA, 639 bp, synthetic construct
  misc_feature 1..639: note = Variant of 3'O-kinase
  source 1..639: mol_type = other DNA
atggcgtttaccattggtttaacaggagggatcgcagcgggcaaatcgactgtgagtgccatgatgcgtgaactgggtctgccggtcatcgatgctgacgaggcagcacgcgccgttatgcgtccaggcgaagaagcttatcgccagattgtagctgcgttctatccgggcattcttcgtgccgatggcgagatcgatcgccagaaactgggtgctatccgcttttcggacgaacaacaacgtaaggtgctgaatgcgattgtaggtcctgcagtcctgaagaagatgctcgctgagaaagaagctcatatccgctcaggcgccaagacggttgtgctggatatcccgctgctgttcgaatccggattgacccattgggtcgacaaagtgctcgtggtgtacgtcgatgatgatgttcagttacgccgccttatggcacgtaacgggtttactgaagaagaagctctgaagcgcattcgttcacagtggcccagtgcggagaaagttaaacgtgcagacgctgtcatcgacaataatggcacgattgaagaaacccgccgccagctgctggccattttacaccagtgggatctgctgggtaagggtggctccggccaccatcatcaccatcactaatga

SEQ ID NO: 3878 - protein, 211 aa, synthetic construct
  REGION 1..211: note = Variant of 3'O-kinase
MAFTIGLTGGIAAGKSTVSAMMRELGLPVIDADEAARAVMRPGEEAYRQIVAAFYPGILRADGEIDRQKLGAIRFSDEQQRKVLNAIVGPAVLKKMLAEKEAHIRSGAKTVVLDIPLLFESGLTHWVDKVLVVYVDDDVQLRRLMARNGFTEEEALKRIRSQWPSAEKVKRADAVIDNNGTIEETRRQLLAILHQWDLLGKGGSGHHHHHH

SEQ ID NO: 3879 - DNA, 639 bp, synthetic construct
  misc_feature 1..639: note = Variant of 3'O-kinase
  source 1..639: mol_type = other DNA
atggcgtttaccattggtttaacaggagggatcgcagcgggcaaatcgactgtgagtgccatgagtcgtgaactgggtctgccggtcatcgatgctgacgaggcagcacgcgccgttatgcgtccaggcgaagaagcttatcgccagattgtagctgcgttcggtccgggcattcttcgtgccgatggcgagatcgatcgccagaaactgggtgctatccgcttttcggacgaacaacaacgtaaggtgctgaatgcgattgtaggtcctgcagtcctgaagaagatgctcgctgagaaagaagctcatatccgctcaggcgccaagacggttgtgctggatatcccgctgctgttcgaatccggattgacccattgggtcgacaaagtgctcgtggtgtacgtcgatgatgatgttcagttacgccgccttatggcacgtaacgggtttactgaagaagaagctctgaagcgcattcgttcacagtggcccagtgcggagaaagttaaacgtgcagacgctgtcatcgacaataatggcacgattgaagaaacccgccgccagctgctggccattttacaccagtgggatctgctgggtaagggtggctccggccaccatcatcaccatcactaatga

SEQ ID NO: 3880 - protein, 211 aa, synthetic construct
  REGION 1..211: note = Variant of 3'O-kinase
MAFTIGLTGGIAAGKSTVSAMSRELGLPVIDADEAARAVMRPGEEAYRQIVAAFGPGILRADGEIDRQKLGAIRFSDEQQRKVLNAIVGPAVLKKMLAEKEAHIRSGAKTVVLDIPLLFESGLTHWVDKVLVVYVDDDVQLRRLMARNGFTEEEALKRIRSQWPSAEKVKRADAVIDNNGTIEETRRQLLAILHQWDLLGKGGSGHHHHHH

SEQ ID NO: 3881 - DNA, 639 bp, synthetic construct
  misc_feature 1..639: note = Variant of 3'O-kinase
  source 1..639: mol_type = other DNA
atggcgtttaccattggtttaacaggagggatcgcagcgggcaaatcgactgtgagtgccatgatgcgtgaactgggtctgccggtcatcgatgctgacgaggcagcacgcgccgttatgcgtccaggcgaagaagcttatcgccagattgtagctgcgttcggtccgggcattcttgtggccgatggcgagatcgatcgccagaaactgggtgctatccgcttttcggacgaacaacaacgtaaggtgctgaatgcgattgtaggtcctgcagtcctgaagaagatgctcgctgagaaagaagctcatatccgctcaggcgccaagacggttgtgctggatatcccgctgctgttcgaatccggattgacccattgggtcgacaaagtgctcgtggtgtacgtcgatgatgatgttcagttacgccgccttatggcacgtaacgggtttactgaagaagaagctctgaagcgcattcgttcacagtggcccagtgcggagaaagttaaacgtgcagacgctgtcatcgacaataatggcacgattgaagaaacccgccgccagctgctggccattttacaccagtgggatctgctgggtaagggtggctccggccaccatcatcaccatcactaatga

SEQ ID NO: 3882 - protein, 211 aa, synthetic construct
  REGION 1..211: note = Variant of 3'O-kinase
MAFTIGLTGGIAAGKSTVSAMMRELGLPVIDADEAARAVMRPGEEAYRQIVAAFGPGILVADGEIDRQKLGAIRFSDEQQRKVLNAIVGPAVLKKMLAEKEAHIRSGAKTVVLDIPLLFESGLTHWVDKVLVVYVDDDVQLRRLMARNGFTEEEALKRIRSQWPSAEKVKRADAVIDNNGTIEETRRQLLAILHQWDLLGKGGSGHHHHHH

SEQ ID NO: 3883 - DNA, 639 bp, synthetic construct
  misc_feature 1..639: note = Variant of 3'O-kinase
  source 1..639: mol_type = other DNA
atggcgtttaccattggtttaacaggagggatcgcagcgggcaaatcgactgtgagtgccatgatgcgtgaactgggtctgccggtcatcgatgctgacgaggcagcacgcgccgttatgcgtccaggcgaagaagcttatcgccagattgtagctgcgttcggtccgggcattcttcgtgccgatggcgagatcgatcgccagaaactgggtgctatccgcttttcggacgaacaacaacgtaaggtgctgaatgcgattgtaggtcctgcagtcctgaagaagatgctcgctgagaaagaagctcatatccgctcaggcgccaagacggttgtgctggatatcccgctgctgttcgaatccggattgacccattgggtcgacaaagtgctcgtggtgtacgtcgatgatgatgttcagttacgccgccttatggcacgtaacgggtttactgaagaagaagctctgaagcgcattcgttcacagtggcccagtgcggagaaagttaaacgtgcaccggctgtcatcgacaataatggcacgattgaagaaacccgccgccagctgctggccattttacaccagtgggatctgctgggtaagggtggctccggccaccatcatcaccatcactaatga

SEQ ID NO: 3884 - protein, 211 aa, synthetic construct
  REGION 1..211: note = Variant of 3'O-kinase
MAFTIGLTGGIAAGKSTVSAMMRELGLPVIDADEAARAVMRPGEEAYRQIVAAFGPGILRADGEIDRQKLGAIRFSDEQQRKVLNAIVGPAVLKKMLAEKEAHIRSGAKTVVLDIPLLFESGLTHWVDKVLVVYVDDDVQLRRLMARNGFTEEEALKRIRSQWPSAEKVKRAPAVIDNNGTIEETRRQLLAILHQWDLLGKGGSGHHHHHH

SEQ ID NO: 3885 - DNA, 639 bp, synthetic construct
  misc_feature 1..639: note = Variant of 3'O-kinase
  source 1..639: mol_type = other DNA
atggcgtttaccattggtttaacaggagggatcgcagcgggcaaatcgactgtgagtgccatgatgcgtgaactgggtctgccggtcatcgatgctgacgaggcagcacgcgccgttatgcgtccaggcgaagaagcttatcgccagattgtagctgcgttcggtccgggcattcttcgtgccgatggcgagatcgatcgccagaaactgggtgctatccgcttttcggacgaacaacaacgtaaggtgctgaatgcgattgtaggtcctgcagtcctgaagaagatgctcgctgagaaagaagctcatatccgctcaggcgccaagacggttgtgctggatatcccgctgctgttcgaatccggattgacccattgggtcgacaaagtgctcgtggtgtacgtcgatgatgatgttcagttacgccgccttatggcacgtaacgggtttactgaagaagaagctctgaagcgcattcgttcacagtggcccagtgcggagaaagttaaacgtgcagacgctgtcatcgacaataatggcacgattgaagaaacccgccgccagctgctggccattttacaccagtgggatctgctgggtaagacgggctccggccaccatcatcaccatcactaatga

SEQ ID NO: 3886 - protein, 211 aa, synthetic construct
  REGION 1..211: note = Variant of 3'O-kinase
MAFTIGLTGGIAAGKSTVSAMMRELGLPVIDADEAARAVMRPGEEAYRQIVAAFGPGILRADGEIDRQKLGAIRFSDEQQRKVLNAIVGPAVLKKMLAEKEAHIRSGAKTVVLDIPLLFESGLTHWVDKVLVVYVDDDVQLRRLMARNGFTEEEALKRIRSQWPSAEKVKRADAVIDNNGTIEETRRQLLAILHQWDLLGKTGSGHHHHHH

SEQ ID NO: 3887 - DNA, 639 bp, synthetic construct
  misc_feature 1..639: note = Variant of 3'O-kinase
  source 1..639: mol_type = other DNA
atggcgtttaccattggtttaacaggagggatcgcagcgggcaaatcgactgtgagtgccatgatgcgtgaactgggtctgccggtcatcgatgctgacgaggcagcacgcgccgttatgcgtccaggcgaagaagcttatcgccagattgtagctgcgttcggtccgggcattcttcgtgccgatggcgagatcgatcgccagaaactgggtgctatccgcttttcggacgaacaacaacgtaaggtgctgaatgcgattgtaggtcctgcagtcctgaagaagatgctcgctgagaaagaagctcatatccgctcaggcgccaagacggttgtgctggatatcccgctgctgttcgaatccggattgacccattggtgtgacaaagtgctcgtggtgtacgtcgatgatgatgttcagttacgccgccttatggcacgtaacgggtttactgaagaagaagctctgaagcgcattcgttcacagtggcccagtgcggagaaagttaaacgtgcagacgctgtcatcgacaataatggcacgattgaagaaacccgccgccagctgctggccattttacaccagtgggatctgctgggtaagggtggctccggccaccatcatcaccatcactaatga

SEQ ID NO: 3888 - protein, 211 aa, synthetic construct
  REGION 1..211: note = Variant of 3'O-kinase
MAFTIGLTGGIAAGKSTVSAMMRELGLPVIDADEAARAVMRPGEEAYRQIVAAFGPGILRADGEIDRQKLGAIRFSDEQQRKVLNAIVGPAVLKKMLAEKEAHIRSGAKTVVLDIPLLFESGLTHWCDKVLVVYVDDDVQLRRLMARNGFTEEEALKRIRSQWPSAEKVKRADAVIDNNGTIEETRRQLLAILHQWDLLGKGGSGHHHHHH

SEQ ID NO: 3889 - DNA, 639 bp, synthetic construct
  misc_feature 1..639: note = Variant of 3'O-kinase
  source 1..639: mol_type = other DNA
atggcgtttaccattggtttaacaggagggatcgcagcgggcaaatcgactgtgagtgccatgatgcgtgaactgggtctgccggtcatcgatgctgacgaggcagcacgcgccgttatgcgtccaggcgaagaagcttatcgccagattgtagctgcgttcggtccgggcattcttcgtgccgatggcgagatcgatcgccagaaactgggtgctatccgcttttcggacgaacaacaacgtaaggtgctgaatgcgattgtaggtcctgcagtcctgaagaagatgctcgctgagaaagaagctcatatccgctcaggcgccaagacggttgtgctggatatcccgctgctgttcgaatccggattgacccattgggtcgacaaagtgctcgtggtgtacgtcgatgatgatgttcagttacgccgccttatggcacgtaacgggtttactattgaagaagctctgaagcgcattcgttcacagtggcccagtgcggagaaagttaaacgtgcagacgctgtcatcgacaataatggcacgattgaagaaacccgccgccagctgctggccattttacaccagtgggatctgctgggtaagggtggctccggccaccatcatcaccatcactaatga

SEQ ID NO: 3890 - protein, 211 aa, synthetic construct
  REGION 1..211: note = Variant of 3'O-kinase
MAFTIGLTGGIAAGKSTVSAMMRELGLPVIDADEAARAVMRPGEEAYRQIVAAFGPGILRADGEIDRQKLGAIRFSDEQQRKVLNAIVGPAVLKKMLAEKEAHIRSGAKTVVLDIPLLFESGLTHWVDKVLVVYVDDDVQLRRLMARNGFTIEEALKRIRSQWPSAEKVKRADAVIDNNGTIEETRRQLLAILHQWDLLGKGGSGHHHHHH

SEQ ID NO: 3891 - DNA, 639 bp, synthetic construct
  misc_feature 1..639: note = Variant of 3'O-kinase
  source 1..639: mol_type = other DNA
atggcgtttaccattggtttaacaggagggatcgcagcgggcaaatcgactgtgagtgccatgatgcgtgaactgggtctgccggtcatcgatgctgacgaggcagcacgcgccgttatgcgtccaggcgaagaagcttatcgccagattgtagctgcgttcggtccgggcattcttcgtgccgatggcgagatcgatcgccagaaactgggtgctatccgcttttcggacgaacaacaacgtaaggtgctgaatgcgattgtaggtcctgcagtcctgaagaagatgctcgctgagaaagaagctcatatccgctcaggcgccaagacggttgtgctggatatcccgctgctgttcgaatccggattgacccattgggtcgacaaagtgctcgtggtgtacgtcgatgatgatgttcagttacgccgccttatggcacgtaacgggtttactgaagaagaagctctgaagcgcattcgttcacagtggcccagtgcggagaaagttaaacgtgcagacgctgtcatcgacaataatggcacgattgaagaaacccgccgccagctgctggccattttacaccagtgggatctggttggtaagggtggctccggccaccatcatcaccatcactaatga

SEQ ID NO: 3892 - protein, 211 aa, synthetic construct
  REGION 1..211: note = Variant of 3'O-kinase
MAFTIGLTGGIAAGKSTVSAMMRELGLPVIDADEAARAVMRPGEEAYRQIVAAFGPGILRADGEIDRQKLGAIRFSDEQQRKVLNAIVGPAVLKKMLAEKEAHIRSGAKTVVLDIPLLFESGLTHWVDKVLVVYVDDDVQLRRLMARNGFTEEEALKRIRSQWPSAEKVKRADAVIDNNGTIEETRRQLLAILHQWDLVGKGGSGHHHHHH

SEQ ID NO: 3893 - DNA, 639 bp, synthetic construct
  misc_feature 1..639: note = Variant of 3'O-kinase
  source 1..639: mol_type = other DNA
atggcgtttaccattggtttaacaggagggatcgcagcgggcaaatcgactgtgagtgccatgatgcgtgaactgggtctgccggtcatcgatgctgacgaggcagcacgcgccgttatgcgtccaggcgaagaagcttatcgccagattgtagctgcgttcggtccgggcattcttcgtgccgatggcgagatcgatcgccagaaactgggtgctatccgcttttcggacgaacaacaacgtaaggtgctgaatgcgattgtaggtcctgcaactctgaagaagatgctcgctgagaaagaagctcatatccgctcaggcgccaagacggttgtgctggatatcccgctgctgttcgaatccggattgacccattgggtcgacaaagtgctcgtggtgtacgtcgatgatgatgttcagttacgccgccttatggcacgtaacgggtttactgaagaagaagctctgaagcgcattcgttcacagtggcccagtgcggagaaagttaaacgtgcagacgctgtcatcgacaataatggcacgattgaagaaacccgccgccagctgctggccattttacaccagtgggatctgctgggtaagggtggctccggccaccatcatcaccatcactaatga

SEQ ID NO: 3894 - protein, 211 aa, synthetic construct
  REGION 1..211: note = Variant of 3'O-kinase
MAFTIGLTGGIAAGKSTVSAMMRELGLPVIDADEAARAVMRPGEEAYRQIVAAFGPGILRADGEIDRQKLGAIRFSDEQQRKVLNAIVGPATLKKMLAEKEAHIRSGAKTVVLDIPLLFESGLTHWVDKVLVVYVDDDVQLRRLMARNGFTEEEALKRIRSQWPSAEKVKRADAVIDNNGTIEETRRQLLAILHQWDLLGKGGSGHHHHHH

SEQ ID NO: 3895 - DNA, 639 bp, synthetic construct
  misc_feature 1..639: note = Variant of 3'O-kinase
  source 1..639: mol_type = other DNA
atggcgtttaccatttggttaacaggagggatcgcagcgggcaaatcgactgtgagtgccatgatgcgtgaactgggtctgccggtcatcgatgctgacgaggcagcacgcgccgttatgcgtccaggcgaagaagcttatcgccagattgtagctgcgttcggtccgggcattcttcgtgccgatggcgagatcgatcgccagaaactgggtgctatccgcttttcggacgaacaacaacgtaaggtgctgaatgcgattgtaggtcctgcagtcctgaagaagatgctcgctgagaaagaagctcatatccgctcaggcgccaagacggttgtgctggatatcccgctgctgttcgaatccggattgacccattgggtcgacaaagtgctcgtggtgtacgtcgatgatgatgttcagttacgccgccttatggcacgtaacgggtttactgaagaagaagctctgaagcgcattcgttcacagtggcccagtgcggagaaagttaaacgtgcagacgctgtcatcgacaataatggcacgattgaagaaacccgccgccagctgctggccattttacaccagtgggatctgctgggtaagggtggctccggccaccatcatcaccatcactaatga

SEQ ID NO: 3896 - protein, 211 aa, synthetic construct
  REGION 1..211: note = Variant of 3'O-kinase
MAFTIWLTGGIAAGKSTVSAMMRELGLPVIDADEAARAVMRPGEEAYRQIVAAFGPGILRADGEIDRQKLGAIRFSDEQQRKVLNAIVGPAVLKKMLAEKEAHIRSGAKTVVLDIPLLFESGLTHWVDKVLVVYVDDDVQLRRLMARNGFTEEEALKRIRSQWPSAEKVKRADAVIDNNGTIEETRRQLLAILHQWDLLGKGGSGHHHHHH

SEQ ID NO: 3897 - DNA, 639 bp, synthetic construct
  misc_feature 1..639: note = Variant of 3'O-kinase
  source 1..639: mol_type = other DNA
atggtgtttaccattggtttaacaggagggatcgcagcgggcaaatcgactgtgagtgccatgatgcgtgaactgggtctgccggtcatcgatgctgacgaggcagcacgcgccgttatgcgtccaggcgaagaagcttatcgccagattgtagctgcgttcggtccgggcattcttcgtgccgatggcgagatcgatcgccagaaactgggtgctatccgcttttcggacgaacaacaacgtaaggtgctgaatgcgattgtaggtcctgcagtcctgaagaagatgctcgctgagaaagaagctcatatccgctcaggcgccaagacggttgtgctggatatcccgctgctgttcgaatccggattgacccattgggtcgacaaagtgctcgtggtgtacgtcgatgatgatgttcagttacgccgccttatggcacgtaacgggtttactgaagaagaagctctgaagcgcattcgttcacagtggcccagtgcggagaaagttaaacgtgcagacgctgtcatcgacaataatggcacgattgaagaaacccgccgccagctgctggccattttacaccagtgggatctgctgggtaagggtggctccggccaccatcatcaccatcactaatga

SEQ ID NO: 3898 - protein, 211 aa, synthetic construct
  REGION 1..211: note = Variant of 3'O-kinase
MVFTIGLTGGIAAGKSTVSAMMRELGLPVIDADEAARAVMRPGEEAYRQIVAAFGPGILRADGEIDRQKLGAIRFSDEQQRKVLNAIVGPAVLKKMLAEKEAHIRSGAKTVVLDIPLLFESGLTHWVDKVLVVYVDDDVQLRRLMARNGFTEEEALKRIRSQWPSAEKVKRADAVIDNNGTIEETRRQLLAILHQWDLLGKGGSGHHHHHH

SEQ ID NO: 3899 - DNA, 639 bp, synthetic construct
  misc_feature 1..639: note = Variant of 3'O-kinase
  source 1..639: mol_type = other DNA
atggcgtttaccattggtttaacaggagggatcgcagcgggcaaatcgactgtgagtgccatgatgcgtgaactgggtctgccggtcatcgatgctgacgaggcagcacgcgccgttatgcgtccaggcgaagaagcttatcgccagattgtagctgcgttcggtccgggcattcttcgtgccgatggcgagatcgatcgccagaaactgggtgctatccgcttttcggacgaacaacaacgtaaggtgctgaatgcgattgtaggtcctgcagtcctgaagaagatgctcgctgagaaagaagctcatatccgctcaggcgccaagacggttgtgctggatatcccgctgctgttcgaatccggattgacccattgggtcgacaaagtgctcgtggtgtacgtcgatgatgatgttcagttacgccgccttatggcacgtaacgggtttactgaagaagaagctctgaagcgcattcgttcacagtggcccagtgcggagaaagttaaacgtgcagacgctgtcatcgacaataatggcacgattgaagaaacccgccgccagctgctggccattttacactcgtgggatctgctgggtaagggtggctccggccaccatcatcaccatcactaatga

SEQ ID NO: 3900 - protein, 211 aa, synthetic construct
  REGION 1..211: note = Variant of 3'O-kinase
MAFTIGLTGGIAAGKSTVSAMMRELGLPVIDADEAARAVMRPGEEAYRQIVAAFGPGILRADGEIDRQKLGAIRFSDEQQRKVLNAIVGPAVLKKMLAEKEAHIRSGAKTVVLDIPLLFESGLTHWVDKVLVVYVDDDVQLRRLMARNGFTEEEALKRIRSQWPSAEKVKRADAVIDNNGTIEETRRQLLAILHSWDLLGKGGSGHHHHHH

SEQ ID NO: 3901 - DNA, 639 bp, synthetic construct
  misc_feature 1..639: note = Variant of 3'O-kinase
  source 1..639: mol_type = other DNA
atggcgtttaccattggtttaacaggagggatcgcagcgggcaaatcgactgtgagtgccatgatgcgtgaactgggtctgccggtcatcgatgctgacgaggcagcacgcgccgttatgcgtccaggcgaagaagcttatcgccagattgtagctgcgttcggtccgggcattcttcgtgccgatggcgagatcgatcgccagaaactgggtgctatccgcttttcggacgaacaacaacgtaaggtgctgaatgcgattgtaggtcctgcagtcctgaagaagatgctcgctgagaaagaagctcatatccgctcaggcgccaagacggttgtgctggatatcccgctgctgttcgaatccggattgacccattgggtcgacaaagtgctcgtggtgtacgtcgatgatgatgttcagttacgccgccttatggcacgtaacgggtttactgaagaagaagctctgaagcgcattcgttcacagtggcccagtgcggagaaagttaaacgtgcagacgctgtcatcgacaataatggcacgattgaagaaacccgccgccagctgctggccattttaggtcagtgggatctgctgggtaagggtggctccggccaccatcatcaccatcactaatga

SEQ ID NO: 3902 - protein, 211 aa, synthetic construct
  REGION 1..211: note = Variant of 3'O-kinase
MAFTIGLTGGIAAGKSTVSAMMRELGLPVIDADEAARAVMRPGEEAYRQIVAAFGPGILRADGEIDRQKLGAIRFSDEQQRKVLNAIVGPAVLKKMLAEKEAHIRSGAKTVVLDIPLLFESGLTHWVDKVLVVYVDDDVQLRRLMARNGFTEEEALKRIRSQWPSAEKVKRADAVIDNNGTIEETRRQLLAILGQWDLLGKGGSGHHHHHH

SEQ ID NO: 3903 - DNA, 639 bp, synthetic construct
  misc_feature 1..639: note = Variant of 3'O-kinase
  source 1..639: mol_type = other DNA
atggcgtttaccattggtttaacaggagggatcgcagcgggcaaatcgactgtgagtgccatgatgcgtgaactgggtctgccggtcatcgatgctgacgaggcagcacgcgccgttatgcgtccaggcgaagaagcttatcgccagattgtagctgcgttcggtccgggcattcttcgtgccgatggcgagatcgatcgccagaaactgggtgctatccgcttttcggacgaacaacaacgtaaggtgctgaatgcgattgtaggtcctgcagtcctgaagaagatgctcgctgagaaagaagctcatatccgctcaggcgccaagacggttgtgctggatatcccgctgctgttcgaatccggattgacccattgggtcgacaaagtgctcgtggtgtacgtcgatgatgatgttcagttacgccgccttatggcacgtaacgggtttactgaagaagaagctctgaagcgcattcgttcacagtggcccagtgcggagaaagttaaacgtgcagacgctgtcatcgacaataatggcacgattgaagaaacccgccgccagctgctggccattttacaccagtgggatctgctgggtaagggtaggtccggccaccatcatcaccatcactaatga

SEQ ID NO: 3904 - protein, 211 aa, synthetic construct
  REGION 1..211: note = Variant of 3'O-kinase
MAFTIGLTGGIAAGKSTVSAMMRELGLPVIDADEAARAVMRPGEEAYRQIVAAFGPGILRADGEIDRQKLGAIRFSDEQQRKVLNAIVGPAVLKKMLAEKEAHIRSGAKTVVLDIPLLFESGLTHWVDKVLVVYVDDDVQLRRLMARNGFTEEEALKRIRSQWPSAEKVKRADAVIDNNGTIEETRRQLLAILHQWDLLGKGRSGHHHHHH

SEQ ID NO: 3905 - DNA, 639 bp, synthetic construct
  misc_feature 1..639: note = Variant of 3'O-kinase
  source 1..639: mol_type = other DNA
atggcgtttaccattggtttaacaggagggatcgcagcgggcaaatcgactgtgagtgccatgatgcgtgaactgactctgccggtcatcgatgctgacgaggcagcacgcgccgttatgcgtccaggcgaagaagcttatcgccagattgtagctgcgttcggtccgggcattcttcgtgccgatggcgagatcgatcgccagaaactgggtgctatccgcttttcggacgaacaacaacgtaaggtgctgaatgcgattgtaggtcctgcagtcctgaagaagatgctcgctgagaaagaagctcatatccgctcaggcgccaagacggttgtgctggatatcccgctgctgttcgaatccggattgacccattgggtcgacaaagtgctcgtggtgtacgtcgatgatgatgttcagttacgccgccttatggcacgtaacgggtttactgaagaagaagctctgaagcgcattcgttcacagtggcccagtgcggagaaagttaaacgtgcagacgctgtcatcgacaataatggcacgattgaagaaacccgccgccagctgctggccattttacaccagtgggatctgctgggtaagggtggctccggccaccatcatcaccatcactaatga

SEQ ID NO: 3906 - protein, 211 aa, synthetic construct
  REGION 1..211: note = Variant of 3'O-kinase
MAFTIGLTGGIAAGKSTVSAMMRELTLPVIDADEAARAVMRPGEEAYRQIVAAFGPGILRADGEIDRQKLGAIRFSDEQQRKVLNAIVGPAVLKKMLAEKEAHIRSGAKTVVLDIPLLFESGLTHWVDKVLVVYVDDDVQLRRLMARNGFTEEEALKRIRSQWPSAEKVKRADAVIDNNGTIEETRRQLLAILHQWDLLGKGGSGHHHHHH

SEQ ID NO: 3907 - DNA, 639 bp, synthetic construct
  misc_feature 1..639: note = Variant of 3'O-kinase
  source 1..639: mol_type = other DNA
atggcgtttaccattggtttaacaggagggatcgcagcgggcaaatcgactgtgagtgccatgatgcgtgaactgggtctgccggtcatcgatgctgacgaggcagcacgcgccgttatgcgtccaggcgaagaagcttatcgccagattgtagctgcgttcggtccgggcattcttcgtgccgatggcgagatcgatcgccagaaactgggtgctatccgcttttcggacgaacaacaacgtaaggtgctgaatgcgattgtaggtcctgcagtcctgaagaagatgctcgctgagaaagaagctcatatccgctcaggcgccaagacggttgtgctggatatcccgctgctgttcgaatccggattgacccattgggtcgacaaagtgctcgtggtgtacgtcgatgatgatgttcagttacgccgccttatggcacgtaacgggtttactgaagaagaagctctgaagcgcattcgttcacagtggcccagtgcggagaaagttaaaacggcagacgctgtcatcgacaataatggcacgattgaagaaacccgccgccagctgctggccattttacaccagtgggatctgctgggtaagggtggctccggccaccatcatcaccatcactaatga

SEQ ID NO: 3908 - protein, 211 aa, synthetic construct
  REGION 1..211: note = Variant of 3'O-kinase
MAFTIGLTGGIAAGKSTVSAMMRELGLPVIDADEAARAVMRPGEEAYRQIVAAFGPGILRADGEIDRQKLGAIRFSDEQQRKVLNAIVGPAVLKKMLAEKEAHIRSGAKTVVLDIPLLFESGLTHWVDKVLVVYVDDDVQLRRLMARNGFTEEEALKRIRSQWPSAEKVKTADAVIDNNGTIEETRRQLLAILHQWDLLGKGGSGHHHHHH

SEQ ID NO: 3909 - DNA, 639 bp, synthetic construct
  misc_feature 1..639: note = Variant of 3'O-kinase
  source 1..639: mol_type = other DNA
atggcgtttaccattggtttaacaggagggatcgcagcgggcaaatcgactgtgagtgccatgatgcgtgaactgggtctgccggtcatcgatgctgacgaggcagcacgcgccgttatgcgtccaggcgaagaagcttatcgccagattgtagctgcgttcggtccgggcattcttcgtgccgatggcgagatcgatcgccagaaactgggtgctatccgcttttcggacgaacaacaacgtaaggtgctgaatgcgattgtaggtcctgcagtcctgaagaagatgctcgctgagaaagaagctcatatccgctcaggcgccaagacggttgtgctggatatcccgctgctgttcgaatccggattgacccattgggtcgacaaagtgctcgtggtgtacgtcgatgatgatgcgcagttacgccgccttatggcacgtaacgggtttactgaagaagaagctctgaagcgcattcgttcacagtggcccagtgcggagaaagttaaacgtgcagacgctgtcatcgacaataatggcacgattgaagaaacccgccgccagctgctggccattttacaccagtgggatctgctgggtaagggtggctccggccaccatcatcaccatcactaatga

SEQ ID NO: 3910 - protein, 211 aa, synthetic construct
  REGION 1..211: note = Variant of 3'O-kinase
MAFTIGLTGGIAAGKSTVSAMMRELGLPVIDADEAARAVMRPGEEAYRQIVAAFGPGILRADGEIDRQKLGAIRFSDEQQRKVLNAIVGPAVLKKMLAEKEAHIRSGAKTVVLDIPLLFESGLTHWVDKVLVVYVDDDAQLRRLMARNGFTEEEALKRIRSQWPSAEKVKRADAVIDNNGTIEETRRQLLAILHQWDLLGKGGSGHHHHHH

SEQ ID NO: 3911 - DNA, 639 bp, synthetic construct
  misc_feature 1..639: note = Variant of 3'O-kinase
  source 1..639: mol_type = other DNA
atggcgtttaccattggtttaacaggagggatcgcagcgggcaaatcgactgtgagtgccatgatgcgtgaactgggtctgccggtcatcgatgctgacgaggcagcacgcgccgttatgcgtccaggcgaagaagcttatcgccagattgtagctgcgttcggtccgggcattcttcgtgccgatggcgagatcgatcgccagaaactgggtgctatccgcttttcggacgaacaacaacgtaaggtgctgaatgcgattgtaggtcctgcagtcctgaagaagatgctcgctgagaaagaagctcatatccgctcaggcgccaagacggttgtgctggatatcccgctgctgttcgaatccggattgacccattgggtcgacaaagtgctcgtggtgtacgtcgatgatgatgttcagttacgccgccttatggcacgtaacgggtttactgaagaagaagctctgaagcgcattcgttcacagtggcccagtgcggagaaagttaaacgtgcagacgctgtcatcgacaataatggcacgattgaagaaacccgccgccagctgctggccattttacaccagtgggatctgctgggtaagggtctgtccggccaccatcatcaccatcactaatga

SEQ ID NO: 3912 - protein, 211 aa, synthetic construct
  REGION 1..211: note = Variant of 3'O-kinase
MAFTIGLTGGIAAGKSTVSAMMRELGLPVIDADEAARAVMRPGEEAYRQIVAAFGPGILRADGEIDRQKLGAIRFSDEQQRKVLNAIVGPAVLKKMLAEKEAHIRSGAKTVVLDIPLLFESGLTHWVDKVLVVYVDDDVQLRRLMARNGFTEEEALKRIRSQWPSAEKVKRADAVIDNNGTIEETRRQLLAILHQWDLLGKGLSGHHHHHH

SEQ ID NO: 3913 - DNA, 639 bp, synthetic construct
  misc_feature 1..639: note = Variant of 3'O-kinase
  source 1..639: mol_type = other DNA
atggcgtttaccattggtttaacaggagggatcgcagcgggcaaatcgactgtgagtgccatgatgcgtgaactgggtctgccggtcatcgatgctgacgaggcagcacgcgccgttatgcgtccaggcgaagaagcttatcgccagattgtagctgcgttcggtccgggcattcttcgtgccgatggcgagatcgatcgccagaaactgggtgctatccgcttttcggacgaacaacaacgtaaggtgccgaatgcgattgtaggtcctgcagtcctgaagaagatgctcgctgagaaagaagctcatatccgctcaggcgccaagacggttgtgctggatatcccgctgctgttcgaatccggattgacccattgggtcgacaaagtgctcgtggtgtacgtcgatgatgatgttcagttacgccgccttatggcacgtaacgggtttactgaagaagaagctctgaagcgcattcgttcacagtggcccagtgcggagaaagttaaacgtgcagacgctgtcatcgacaataatggcacgattgaagaaacccgccgccagctgctggccattttacaccagtgggatctgctgggtaagggtggctccggccaccatcatcaccatcactaatga

SEQ ID NO: 3914 - protein, 211 aa, synthetic construct
  REGION 1..211: note = Variant of 3'O-kinase
MAFTIGLTGGIAAGKSTVSAMMRELGLPVIDADEAARAVMRPGEEAYRQIVAAFGPGILRADGEIDRQKLGAIRFSDEQQRKVPNAIVGPAVLKKMLAEKEAHIRSGAKTVVLDIPLLFESGLTHWVDKVLVVYVDDDVQLRRLMARNGFTEEEALKRIRSQWPSAEKVKRADAVIDNNGTIEETRRQLLAILHQWDLLGKGGSGHHHHHH

SEQ ID NO: 3915 - DNA, 639 bp, synthetic construct
  misc_feature 1..639: note = Variant of 3'O-kinase
  source 1..639: mol_type = other DNA
atggcgtttaccattggtttaacaggagggatcgcagcgggcaaatcgactgtgagtgccatgatgcgtgaactgggtctgccggtcatcgatgctgacgaggcagcacgcgccgttatgcgtccaggcgaagaagcttatcgccagattgtagctgcgttcggtccgggcattcttcgttatgatggcgagatcgatcgccagaaactgggtgctatccgcttttcggacgaacaacaacgtaaggtgctgaatgcgattgtaggtcctgcagtcctgaagaagatgctcgctgagaaagaagctcatatccgctcaggcgccaagacggttgtgctggatatcccgctgctgttcgaatccggattgacccattgggtcgacaaagtgctcgtggtgtacgtcgatgatgatgttcagttacgccgccttatggcacgtaacgggtttactgaagaagaagctctgaagcgcattcgttcacagtggcccagtgcggagaaagttaaacgtgcagacgctgtcatcgacaataatggcacgattgaagaaacccgccgccagctgctggccattttacaccagtgggatctgctgggtaagggtggctccggccaccatcatcaccatcactaatga

SEQ ID NO: 3916 - protein, 211 aa, synthetic construct
  REGION 1..211: note = Variant of 3'O-kinase
MAFTIGLTGGIAAGKSTVSAMMRELGLPVIDADEAARAVMRPGEEAYRQIVAAFGPGILRYDGEIDRQKLGAIRFSDEQQRKVLNAIVGPAVLKKMLAEKEAHIRSGAKTVVLDIPLLFESGLTHWVDKVLVVYVDDDVQLRRLMARNGFTEEEALKRIRSQWPSAEKVKRADAVIDNNGTIEETRRQLLAILHQWDLLGKGGSGHHHHHH

SEQ ID NO: 3917 - DNA, 639 bp, synthetic construct
  misc_feature 1..639: note = Variant of 3'O-kinase
  source 1..639: mol_type = other DNA
atggcgtttaccattggtttaacaggagggatcgcagcgggcaaatcgactgtgagtgccatgatgcgtgaactgggtctgccggtcatcgatgctgacgaggcagcacgcgccgttatgcgtccaggcgaagaagcttatcgccagattgtagctaggttcggtccgggcattcttcgtgccgatggcgagatcgatcgccagaaactgggtgctatccgcttttcggacgaacaacaacgtaaggtgctgaatgcgattgtaggtcctgcagtcctgaagaagatgctcgctgagaaagaagctcatatccgctcaggcgccaagacggttgtgctggatatcccgctgctgttcgaatccggattgacccattgggtcgacaaagtgctcgtggtgtacgtcgatgatgatgttcagttacgccgccttatggcacgtaacgggtttactgaagaagaagctctgaagcgcattcgttcacagtggcccagtgcggagaaagttaaacgtgcagacgctgtcatcgacaataatggcacgattgaagaaacccgccgccagctgctggccattttacaccagtgggatctgctgggtaagggtggctccggccaccatcatcaccatcactaatga

SEQ ID NO: 3918 - protein, 211 aa, synthetic construct
  REGION 1..211: note = Variant of 3'O-kinase
MAFTIGLTGGIAAGKSTVSAMMRELGLPVIDADEAARAVMRPGEEAYRQIVARFGPGILRADGEIDRQKLGAIRFSDEQQRKVLNAIVGPAVLKKMLAEKEAHIRSGAKTVVLDIPLLFESGLTHWVDKVLVVYVDDDVQLRRLMARNGFTEEEALKRIRSQWPSAEKVKRADAVIDNNGTIEETRRQLLAILHQWDLLGKGGSGHHHHHH

SEQ ID NO: 3919 - DNA, 639 bp, synthetic construct
  misc_feature 1..639: note = Variant of 3'O-kinase
  source 1..639: mol_type = other DNA
atggcgtttaccattggttcgacaggagggatcgcagcgggcaaatcgactgtgagtgccatgatgcgtgaactgggtctgccggtcatcgatgctgacgaggcagcacgcgccgttatgcgtccaggcgaagaagcttatcgccagattgtagctgcgttcggtccgggcattcttcgtgccgatggcgagatcgatcgccagaaactgggtgctatccgcttttcggacgaacaacaacgtaaggtgctgaatgcgattgtaggtcctgcagtcctgaagaagatgctcgctgagaaagaagctcatatccgctcaggcgccaagacggttgtgctggatatcccgctgctgttcgaatccggattgacccattgggtcgacaaagtgctcgtggtgtacgtcgatgatgatgttcagttacgccgccttatggcacgtaacgggtttactgaagaagaagctctgaagcgcattcgttcacagtggcccagtgcggagaaagttaaacgtgcagacgctgtcatcgacaataatggcacgattgaagaaacccgccgccagctgctggccattttacaccagtgggatctgctgggtaagggtggctccggccaccatcatcaccatcactaatga

SEQ ID NO: 3920 - protein, 211 aa, synthetic construct
  REGION 1..211: note = Variant of 3'O-kinase
MAFTIGSTGGIAAGKSTVSAMMRELGLPVIDADEAARAVMRPGEEAYRQIVAAFGPGILRADGEIDRQKLGAIRFSDEQQRKVLNAIVGPAVLKKMLAEKEAHIRSGAKTVVLDIPLLFESGLTHWVDKVLVVYVDDDVQLRRLMARNGFTEEEALKRIRSQWPSAEKVKRADAVIDNNGTIEETRRQLLAILHQWDLLGKGGSGHHHHHH

SEQ ID NO: 3921 - DNA, 639 bp, synthetic construct
  misc_feature 1..639: note = Variant of 3'O-kinase
  source 1..639: mol_type = other DNA
atggcgtttaccattggtttaacaggagggatcgcagcgggcaaatcgactgtgagtgccatgatgcgtgaactgggtctgccggtcatcgatgctgacgaggcagcacgcgccgttatgcgtccaggcgaagaagcttatcgccagattgtagctgcgttcggtccgggcattcttctggccgatggcgagatcgatcgccagaaactgggtgctatccgcttttcggacgaacaacaacgtaaggtgctgaatgcgattgtaggtcctgcagtcctgaagaagatgctcgctgagaaagaagctcatatccgctcaggcgccaagacggttgtgctggatatcccgctgctgttcgaatccggattgacccattgggtcgacaaagtgctcgtggtgtacgtcgatgatgatgttcagttacgccgccttatggcacgtaacgggtttactgaagaagaagctctgaagcgcattcgttcacagtggcccagtgcggagaaagttaaacgtgcagacgctgtcatcgacaataatggcacgattgaagaaacccgccgccagctgctggccattttacaccagtgggatctgctgggtaagggtggctccggccaccatcatcaccatcactaatga

SEQ ID NO: 3922 - protein, 211 aa, synthetic construct
  REGION 1..211: note = Variant of 3'O-kinase
MAFTIGLTGGIAAGKSTVSAMMRELGLPVIDADEAARAVMRPGEEAYRQIVAAFGPGILLADGEIDRQKLGAIRFSDEQQRKVLNAIVGPAVLKKMLAEKEAHIRSGAKTVVLDIPLLFESGLTHWVDKVLVVYVDDDVQLRRLMARNGFTEEEALKRIRSQWPSAEKVKRADAVIDNNGTIEETRRQLLAILHQWDLLGKGGSGHHHHHH

SEQ ID NO: 3923 - DNA, 639 bp, synthetic construct
  misc_feature 1..639: note = Variant of 3'O-kinase
  source 1..639: mol_type = other DNA
atggcgtttaccattggtttaacaggagggatcgcagcgggcaaatcgactgtgagtgccatgatgcgtgaactgggtctgccggtcatcgatgctgacgaggcagcacgcgccgttatgcgtccaggcgaagaagcttatcgccagattgtagctgcgttcggtccgggcattcttcgtgccgatggcgagatcgatcgccagaaactgggtgctatccgcttttcggacgaacaacaacgtaaggtgctgaatgcgattgtaggtcctgcagtcctgaagaagatgctcgctgagaaagaagctcatatccgctcaggcgccaagacggttgtgctggatatcccgctgctgttcgaatccggattgacccattgggtcgacaaagtgctcgtggtgtacgtcgatgatgatgttcagttacgccgccttatggcacgtaacgggtttactgaagaagaagctctgaagcgcattcgttcacagtggcccagtgcggagaaagttaaagtggcagacgctgtcatcgacaataatggcacgattgaagaaacccgccgccagctgctggccattttacaccagtgggatctgctgggtaagggtggctccggccaccatcatcaccatcactaatga

SEQ ID NO: 3924 - protein, 211 aa, synthetic construct
  REGION 1..211: note = Variant of 3'O-kinase
MAFTIGLTGGIAAGKSTVSAMMRELGLPVIDADEAARAVMRPGEEAYRQIVAAFGPGILRADGEIDRQKLGAIRFSDEQQRKVLNAIVGPAVLKKMLAEKEAHIRSGAKTVVLDIPLLFESGLTHWVDKVLVVYVDDDVQLRRLMARNGFTEEEALKRIRSQWPSAEKVKVADAVIDNNGTIEETRRQLLAILHQWDLLGKGGSGHHHHHH

SEQ ID NO: 3925 - DNA, 639 bp, synthetic construct
  misc_feature 1..639: note = Variant of 3'O-kinase
  source 1..639: mol_type = other DNA
atggcgtttaccactggtttaacaggagggatcgcagcgggcaaatcgactgtgagtgccatgatgcgtgaactgggtctgccggtcatcgatgctgacgaggcagcacgcgccgttatgcgtccaggcgaagaagcttatcgccagattgtagctgcgttcggtccgggcattcttcgtgccgatggcgagatcgatcgccagaaactgggtgctatccgcttttcggacgaacaacaacgtaaggtgctgaatgcgattgtaggtcctgcagtcctgaagaagatgctcgctgagaaagaagctcatatccgctcaggcgccaagacggttgtgctggatatcccgctgctgttcgaatccggattgacccattgggtcgacaaagtgctcgtggtgtacgtcgatgatgatgttcagttacgccgccttatggcacgtaacgggtttactgaagaagaagctctgaagcgcattcgttcacagtggcccagtgcggagaaagttaaacgtgcagacgctgtcatcgacaataatggcacgattgaagaaacccgccgccagctgctggccattttacaccagtgggatctgctgggtaagggtggctccggccaccatcatcaccatcactaatga

SEQ ID NO: 3926 - protein, 211 aa, synthetic construct
  REGION 1..211: note = Variant of 3'O-kinase
MAFTTGLTGGIAAGKSTVSAMMRELGLPVIDADEAARAVMRPGEEAYRQIVAAFGPGILRADGEIDRQKLGAIRFSDEQQRKVLNAIVGPAVLKKMLAEKEAHIRSGAKTVVLDIPLLFESGLTHWVDKVLVVYVDDDVQLRRLMARNGFTEEEALKRIRSQWPSAEKVKRADAVIDNNGTIEETRRQLLAILHQWDLLGKGGSGHHHHHH

SEQ ID NO: 3927 - DNA, 639 bp, synthetic construct
  misc_feature 1..639: note = Variant of 3'O-kinase
  source 1..639: mol_type = other DNA
atggcgtttaccattggtttaacaggagggatcgcagcgggcaaatcgactgtgagtgccatgatgcgtgaactgggtctgccggtcatcgatgctgacgaggcagcacgcgccgttatgcgtccaggcgaagaagcttatcgccagattgtagctgcgttcggtccgggcattcttcgtgccgatggcgagatcgatcgccagaaactgggtgctatccgcttttcggacgaacaacaacgtaaggtgctgaatgcgattgtaggtcctgcagtcctgaagaagatgctcgctgagaaagaagctcatatccgctcaggcgccaagacggttgtgctggatatcccgctgctgttcgaatccggattgacccatatggtcgacaaagtgctcgtggtgtacgtcgatgatgatgttcagttacgccgccttatggcacgtaacgggtttactgaagaagaagctctgaagcgcattcgttcacagtggcccagtgcggagaaagttaaacgtgcagacgctgtcatcgacaataatggcacgattgaagaaacccgccgccagctgctggccattttacaccagtgggatctgctgggtaagggtggctccggccaccatcatcaccatcactaatga

SEQ ID NO: 3928 - protein, 211 aa, synthetic construct
  REGION 1..211: note = Variant of 3'O-kinase
MAFTIGLTGGIAAGKSTVSAMMRELGLPVIDADEAARAVMRPGEEAYRQIVAAFGPGILRADGEIDRQKLGAIRFSDEQQRKVLNAIVGPAVLKKMLAEKEAHIRSGAKTVVLDIPLLFESGLTHMVDKVLVVYVDDDVQLRRLMARNGFTEEEALKRIRSQWPSAEKVKRADAVIDNNGTIEETRRQLLAILHQWDLLGKGGSGHHHHHH

SEQ ID NO: 3929 - DNA, 639 bp, synthetic construct
  misc_feature 1..639: note = Variant of 3'O-kinase
  source 1..639: mol_type = other DNA
atggcgtttaccattggtttaacaggagggatcgcagcgggcaaatcgactgtgagtgccatgatgcgtgaactgggtctgccggtcatcgataaggacgaggcagcacgcgccgttatgcgtccaggcgaagaagcttatcgccagattgtagctgcgttcggtccgggcattcttcgtgccgatggcgagatcgatcgccagaaactgggtgctatccgcttttcggacgaacaacaacgtaaggtgctgaatgcgattgtaggtcctgcagtcctgaagaagatgctcgctgagaaagaagctcatatccgctcaggcgccaagacggttgtgctggatatcccgctgctgttcgaatccggattgacccattgggtcgacaaagtgctcgtggtgtacgtcgatgatgatgttcagttacgccgccttatggcacgtaacgggtttactgaagaagaagctctgaagcgcattcgttcacagtggcccagtgcggagaaagttaaacgtgcagacgctgtcatcgacaataatggcacgattgaagaaacccgccgccagctgctggccattttacaccagtgggatctgctgggtaagggtggctccggccaccatcatcaccatcactaatga

SEQ ID NO: 3930 - protein, 211 aa, synthetic construct
  REGION 1..211: note = Variant of 3'O-kinase
MAFTIGLTGGIAAGKSTVSAMMRELGLPVIDKDEAARAVMRPGEEAYRQIVAAFGPGILRADGEIDRQKLGAIRFSDEQQRKVLNAIVGPAVLKKMLAEKEAHIRSGAKTVVLDIPLLFESGLTHWVDKVLVVYVDDDVQLRRLMARNGFTEEEALKRIRSQWPSAEKVKRADAVIDNNGTIEETRRQLLAILHQWDLLGKGGSGHHHHHH

SEQ ID NO: 3931 - DNA, 639 bp, synthetic construct
  misc_feature 1..639: note = Variant of 3'O-kinase
  source 1..639: mol_type = other DNA
atggcgtttaccattggtttaacaggagggatcgcagcgggcaaatcgactgtgagtgccatgatgcgtgaactgggtctgccggtcatcgatgctgacgaggcagcacgcgccgttatgcgtccaggcgaagaagcttatcgccagattgtagctgcgttcggtccgggcattcttcgtgccgatggcgagatcgatcgccagaaactgggtgctatccgcttttcggacgaacaacaacgtaaggtgctggttgcgattgtaggtcctgcagtcctgaagaagatgctcgctgagaaagaagctcatatccgctcaggcgccaagacggttgtgctggatatcccgctgctgttcgaatccggattgacccattgggtcgacaaagtgctcgtggtgtacgtcgatgatgatgttcagttacgccgccttatggcacgtaacgggtttactgaagaagaagctctgaagcgcattcgttcacagtggcccagtgcggagaaagttaaacgtgcagacgctgtcatcgacaataatggcacgattgaagaaacccgccgccagctgctggccattttacaccagtgggatctgctgggtaagggtggctccggccaccatcatcaccatcactaatga

SEQ ID NO: 3932 - protein, 211 aa, synthetic construct
  REGION 1..211: note = Variant of 3'O-kinase
MAFTIGLTGGIAAGKSTVSAMMRELGLPVIDADEAARAVMRPGEEAYRQIVAAFGPGILRADGEIDRQKLGAIRFSDEQQRKVLVAIVGPAVLKKMLAEKEAHIRSGAKTVVLDIPLLFESGLTHWVDKVLVVYVDDDVQLRRLMARNGFTEEEALKRIRSQWPSAEKVKRADAVIDNNGTIEETRRQLLAILHQWDLLGKGGSGHHHHHH

SEQ ID NO: 3933 - DNA, 639 bp, synthetic construct
  misc_feature 1..639: note = Variant of 3'O-kinase
  source 1..639: mol_type = other DNA
atggcgtttaccattggtttaacaggagggatcgcagcgggcaaatcgactgtgagtgccatgatgcgtgaactgggtctgccggtcatcgatgctgacgaggcagcacgcgccgttatgcgtccaggcgaagaagcttatcgccagattgtagctgcgttcggtccgggcattcttcgtgccgatggcgagatcgatcgccagaaactgggtgctatccgcttttcggacgaacaacaacgtaaggtgctgaatgcgattgtaggtcctgcagtcctgaagaagatgctcgctgagaaagaagctcattgtcgctcaggcgccaagacggttgtgctggatatcccgctgctgttcgaatccggattgacccattgggtcgacaaagtgctcgtggtgtacgtcgatgatgatgttcagttacgccgccttatggcacgtaacgggtttactgaagaagaagctctgaagcgcattcgttcacagtggcccagtgcggagaaagttaaacgtgcagacgctgtcatcgacaataatggcacgattgaagaaacccgccgccagctgctggccattttacaccagtgggatctgctgggtaagggtggctccggccaccatcatcaccatcactaatga

SEQ ID NO: 3934 - protein, 211 aa, synthetic construct
  REGION 1..211: note = Variant of 3'O-kinase
MAFTIGLTGGIAAGKSTVSAMMRELGLPVIDADEAARAVMRPGEEAYRQIVAAFGPGILRADGEIDRQKLGAIRFSDEQQRKVLNAIVGPAVLKKMLAEKEAHCRSGAKTVVLDIPLLFESGLTHWVDKVLVVYVDDDVQLRRLMARNGFTEEEALKRIRSQWPSAEKVKRADAVIDNNGTIEETRRQLLAILHQWDLLGKGGSGHHHHHH

SEQ ID NO: 3935 - DNA, 639 bp, synthetic construct
  misc_feature 1..639: note = Variant of 3'O-kinase
  source 1..639: mol_type = other DNA
atggcgtttaccattggtttaacaggagggatcgcagcgggcaaatcgactgtgagtgccatgatgcgtgaactgggtctgccggtcatcgatgctgacgaggcagcacgcgccgttatgcgtccaggcgaagaagcttatcgccagattgtagctgcgttcggtccgggcattcttcgtgccgatggcgagatcgatcgccagaaactgggtgctatccgcttttcggacgaacaacaacgtaaggtgctgaatgcgattgtaggtcctgcagtcctgaagaagatgctcgctgagaaagaagctcatcgtcgctcaggcgccaagacggttgtgctggatatcccgctgctgttcgaatccggattgacccattgggtcgacaaagtgctcgtggtgtacgtcgatgatgatgttcagttacgccgccttatggcacgtaacgggtttactgaagaagaagctctgaagcgcattcgttcacagtggcccagtgcggagaaagttaaacgtgcagacgctgtcatcgacaataatggcacgattgaagaaacccgccgccagctgctggccattttacaccagtgggatctgctgggtaagggtggctccggccaccatcatcaccatcactaatga

SEQ ID NO: 3936 - protein, 211 aa, synthetic construct
  REGION 1..211: note = Variant of 3'O-kinase
MAFTIGLTGGIAAGKSTVSAMMRELGLPVIDADEAARAVMRPGEEAYRQIVAAFGPGILRADGEIDRQKLGAIRFSDEQQRKVLNAIVGPAVLKKMLAEKEAHRRSGAKTVVLDIPLLFESGLTHWVDKVLVVYVDDDVQLRRLMARNGFTEEEALKRIRSQWPSAEKVKRADAVIDNNGTIEETRRQLLAILHQWDLLGKGGSGHHHHHH

SEQ ID NO: 3937 - DNA, 639 bp, synthetic construct
  misc_feature 1..639: note = Variant of 3'O-kinase
  source 1..639: mol_type = other DNA
atggcgtttaccattggtttaacaggagggatcgcagcgggcaaatcgactgtgagtgccatgatgcgtgaactgggtctgccggtcatcgatgctgacgaggcagcacgcgccgttatgcgtccaggcgaagaagcttatcgccagattgtagctgcgttcggtccgggcattcttcgtgccgatggcgagatcgatcgccagaaactgggtgctatccgcttttcggacgaacaacaacgtaaggtgctgaatgcgattgtaggtcctgcagtcctgaagaagatgctcgctgagaaagaagctcatatccgctcaggcgccctgacggttgtgctggatatcccgctgctgttcgaatccggattgacccattgggtcgacaaagtgctcgtggtgtacgtcgatgatgatgttcagttacgccgccttatggcacgtaacgggtttactgaagaagaagctctgaagcgcattcgttcacagtggcccagtgcggagaaagttaaacgtgcagacgctgtcatcgacaataatggcacgattgaagaaacccgccgccagctgctggccattttacaccagtgggatctgctgggtaagggtggctccggccaccatcatcaccatcactaatga

SEQ ID NO: 3938 - protein, 211 aa, synthetic construct
  REGION 1..211: note = Variant of 3'O-kinase
MAFTIGLTGGIAAGKSTVSAMMRELGLPVIDADEAARAVMRPGEEAYRQIVAAFGPGILRADGEIDRQKLGAIRFSDEQQRKVLNAIVGPAVLKKMLAEKEAHIRSGALTVVLDIPLLFESGLTHWVDKVLVVYVDDDVQLRRLMARNGFTEEEALKRIRSQWPSAEKVKRADAVIDNNGTIEETRRQLLAILHQWDLLGKGGSGHHHHHH

SEQ ID NO: 3939 - DNA, 639 bp, synthetic construct
  misc_feature 1..639: note = Variant of 3'O-kinase
  source 1..639: mol_type = other DNA
atggcgtttaccattggtttaacaggagggatcgcagcgggcaaatcgactgtgagtgccatgatgcgtgaagtgggtctgccggtcatcgatgctgacgaggcagcacgcgccgttatgcgtccaggcgaagaagcttatcgccagattgtagctgcgttcggtccgggcattcttcgtgccgatggcgagatcgatcgccagaaactgggtgctatccgcttttcggacgaacaacaacgtaaggtgctgaatgcgattgtaggtcctgcagtcctgaagaagatgctcgctgagaaagaagctcatatccgctcaggcgccaagacggttgtgctggatatcccgctgctgttcgaatccggattgacccattgggtcgacaaagtgctcgtggtgtacgtcgatgatgatgttcagttacgccgccttatggcacgtaacgggtttactgaagaagaagctctgaagcgcattcgttcacagtggcccagtgcggagaaagttaaacgtgcagacgctgtcatcgacaataatggcacgattgaagaaacccgccgccagctgctggccattttacaccagtgggatctgctgggtaagggtggctccggccaccatcatcaccatcactaatga

SEQ ID NO: 3940 - protein, 211 aa, synthetic construct
  REGION 1..211: note = Variant of 3'O-kinase
MAFTIGLTGGIAAGKSTVSAMMREVGLPVIDADEAARAVMRPGEEAYRQIVAAFGPGILRADGEIDRQKLGAIRFSDEQQRKVLNAIVGPAVLKKMLAEKEAHIRSGAKTVVLDIPLLFESGLTHWVDKVLVVYVDDDVQLRRLMARNGFTEEEALKRIRSQWPSAEKVKRADAVIDNNGTIEETRRQLLAILHQWDLLGKGGSGHHHHHH

SEQ ID NO: 3941 - DNA, 639 bp, synthetic construct
  misc_feature 1..639: note = Variant of 3'O-kinase
  source 1..639: mol_type = other DNA
atggcgtttaccattggtttaacaggagggatcgcagcgggcaaatcgactgtgagtgccatgatgcgtgaactgggtctgccggtcatcgatgctgacgaggcagcacgcgccgttatgcgtccaggcgaagaagcttatcgccagattgtagctgcgttcggtccgggcattcttcgtgccgatggcgagatcgatcgccagaaactgggtgctatccgcttttcggacgaacaacaacgtaaggtgctgaatgcgattgtaggtcctgcagtcctgaagaagatgctcgctgagaaagaagctcatatccgctcaggcgccaagacggttgtgctggatatcccgctgctgttcgaatccggattgacccattgggtcgacaaagtgctcgtggtgtacgtcgatgatgatgttcagttacgccgccttatggcacgtaacacttttactgaagaagaagctctgaagcgcattcgttcacagtggcccagtgcggagaaagttaaacgtgcagacgctgtcatcgacaataatggcacgattgaagaaacccgccgccagctgctggccattttacaccagtgggatctgctgggtaagggtggctccggccaccatcatcaccatcactaatga

SEQ ID NO: 3942 - protein, 211 aa, synthetic construct
  REGION 1..211: note = Variant of 3'O-kinase
MAFTIGLTGGIAAGKSTVSAMMRELGLPVIDADEAARAVMRPGEEAYRQIVAAFGPGILRADGEIDRQKLGAIRFSDEQQRKVLNAIVGPAVLKKMLAEKEAHIRSGAKTVVLDIPLLFESGLTHWVDKVLVVYVDDDVQLRRLMARNTFTEEEALKRIRSQWPSAEKVKRADAVIDNNGTIEETRRQLLAILHQWDLLGKGGSGHHHHHH

SEQ ID NO: 3943 - DNA, 639 bp, synthetic construct
  misc_feature 1..639: note = Variant of 3'O-kinase
  source 1..639: mol_type = other DNA
atggcgtttaccattggtttaacaggagggatcgcagcgggcaaatcgactgtgagtgccatgatgcgtgaactgggtctgccggtcatcgatgctgacgaggcagcacgcgccgttatgcgtccaggcgaagaagcttatcgccagattgtagctgcgttcggtatgggcattcttcgtgccgatggcgagatcgatcgccagaaactgggtgctatccgcttttcggacgaacaacaacgtaaggtgctgaatgcgattgtaggtcctgcagtcctgaagaagatgctcgctgagaaagaagctcatatccgctcaggcgccaagacggttgtgctggatatcccgctgctgttcgaatccggattgacccattgggtcgacaaagtgctcgtggtgtacgtcgatgatgatgttcagttacgccgccttatggcacgtaacgggtttactgaagaagaagctctgaagcgcattcgttcacagtggcccagtgcggagaaagttaaacgtgcagacgctgtcatcgacaataatggcacgattgaagaaacccgccgccagctgctggccattttacaccagtgggatctgctgggtaagggtggctccggccaccatcatcaccatcactaatga

SEQ ID NO: 3944 - protein, 211 aa, synthetic construct
  REGION 1..211: note = Variant of 3'O-kinase
MAFTIGLTGGIAAGKSTVSAMMRELGLPVIDADEAARAVMRPGEEAYRQIVAAFGMGILRADGEIDRQKLGAIRFSDEQQRKVLNAIVGPAVLKKMLAEKEAHIRSGAKTVVLDIPLLFESGLTHWVDKVLVVYVDDDVQLRRLMARNGFTEEEALKRIRSQWPSAEKVKRADAVIDNNGTIEETRRQLLAILHQWDLLGKGGSGHHHHHH

SEQ ID NO: 3945 - DNA, 639 bp, synthetic construct
  misc_feature 1..639: note = Variant of 3'O-kinase
  source 1..639: mol_type = other DNA
atggcgtttaccattggtttaacaggagggatcgcagcgggcaaatcgactgtgagtgccatgatgcgtgaactgggtctgccggtcatcgatgctgacgaggcagcacgcgccgttatgcgtccaggcgaagaagcttatcgccagattgtagctgcgttcggtccgggcattcttcgtgccgatggcgagatcgatcgccagaaactgggtgctatccgcttttcggacgaacaacaacgtaaggtgctgaatgcgattgtaggtcctgcagtcctgaagaagatgctcgctgagaaagaagctcatatccgctcaggcgccaagacggttgtgctggatatcccgctgctgttcgaatccggattgacccattgggtcgacaaagtgctcgtggtgtacgtcgatgatgatgttcagttacgccgccttatggcacgtaacgggtttactgaagaagaagctctgaagcgcattcgttcacagtggcccagtgcgattaaagttaaacgtgcagacgctgtcatcgacaataatggcacgattgaagaaacccgccgccagctgctggccattttacaccagtgggatctgctgggtaagggtggctccggccaccatcatcaccatcactaatga

SEQ ID NO: 3946 - protein, 211 aa, synthetic construct
  REGION 1..211: note = Variant of 3'O-kinase
MAFTIGLTGGIAAGKSTVSAMMRELGLPVIDADEAARAVMRPGEEAYRQIVAAFGPGILRADGEIDRQKLGAIRFSDEQQRKVLNAIVGPAVLKKMLAEKEAHIRSGAKTVVLDIPLLFESGLTHWVDKVLVVYVDDDVQLRRLMARNGFTEEEALKRIRSQWPSAIKVKRADAVIDNNGTIEETRRQLLAILHQWDLLGKGGSGHHHHHH

SEQ ID NO: 3947 - DNA, 639 bp, synthetic construct
  misc_feature 1..639: note = Variant of 3'O-kinase
  source 1..639: mol_type = other DNA
atggcgtttaccattggtttaacaggagggatcgcagcgggcaaatcgactgtgagtgccatgatgcgtgaactgggtctgccggtcatcgatgctgacgaggcagcacgcgccgttatgcgtccaggcgaagaagcttatcgccaggttgtagctgcgttcggtccgggcattcttcgtgccgatggcgagatcgatcgccagaaactgggtgctatccgcttttcggacgaacaacaacgtaaggtgctgaatgcgattgtaggtcctgcagtcctgaagaagatgctcgctgagaaagaagctcatatccgctcaggcgccaagacggttgtgctggatatcccgctgctgttcgaatccggattgacccattgggtcgacaaagtgctcgtggtgtacgtcgatgatgatgttcagttacgccgccttatggcacgtaacgggtttactgaagaagaagctctgaagcgcattcgttcacagtggcccagtgcggagaaagttaaacgtgcagacgctgtcatcgacaataatggcacgattgaagaaacccgccgccagctgctggccattttacaccagtgggatctgctgggtaagggtggctccggccaccatcatcaccatcactaatga

SEQ ID NO: 3948 - protein, 211 aa, synthetic construct
  REGION 1..211: note = Variant of 3'O-kinase
MAFTIGLTGGIAAGKSTVSAMMRELGLPVIDADEAARAVMRPGEEAYRQVVAAFGPGILRADGEIDRQKLGAIRFSDEQQRKVLNAIVGPAVLKKMLAEKEAHIRSGAKTVVLDIPLLFESGLTHWVDKVLVVYVDDDVQLRRLMARNGFTEEEALKRIRSQWPSAEKVKRADAVIDNNGTIEETRRQLLAILHQWDLLGKGGSGHHHHHH

SEQ ID NO: 3949 - DNA, 639 bp, synthetic construct
  misc_feature 1..639: note = Variant of 3'O-kinase
  source 1..639: mol_type = other DNA
atggcgtttaccattggtttaacaggagggatcgcagcgggcaaatcgactgtgagtgccatgatgcgtgaactgggtctgccggtcatcgatgctgacgaggcagcacgcgccgttatgcgtccaggcgaagaagcttatcgccagattgtagctgcgttcggtccgggcattcttcgtgccgatggcgagatcgatcgccagaaactgggtgctatccgcttttcggacgaacaacaacgtaaggtgctgaatgcgattgtaggtcctgcagtcctgaagaagatgctcgctgagaaagaagctcatatccgctcaggcgccaagacggttgtgctggatatcccgctgctgttcgaatccggattgacccattgggtcgacaaagtgctcgtggtgtacgtcgatgatgatgttcagttacgccgccttatggcacgtaacgggtttactgaagaagaagctctgaagcgcattcgttcacagtggcccagtgcggagaaagttaaacgtgcagacgctgtcatcgacaataatggcacgattgaagaaacccgccgccagctgctgacgattttacaccagtgggatctgctgggtaagggtggctccggccaccatcatcaccatcactaatga

SEQ ID NO: 3950 - protein, 211 aa, synthetic construct
  REGION 1..211: note = Variant of 3'O-kinase
MAFTIGLTGGIAAGKSTVSAMMRELGLPVIDADEAARAVMRPGEEAYRQIVAAFGPGILRADGEIDRQKLGAIRFSDEQQRKVLNAIVGPAVLKKMLAEKEAHIRSGAKTVVLDIPLLFESGLTHWVDKVLVVYVDDDVQLRRLMARNGFTEEEALKRIRSQWPSAEKVKRADAVIDNNGTIEETRRQLLTILHQWDLLGKGGSGHHHHHH

SEQ ID NO: 3951 - DNA, 639 bp, synthetic construct
  misc_feature 1..639: note = Variant of 3'O-kinase
  source 1..639: mol_type = other DNA
atggcgtttaccattggtttaacaggagggatcgcagcgggcaaatcgactgtgagtgccatgatgcgtgaactgggtctgccggtcatcgatgctgacgaggcagcacgcgccgttatgcgtccaggcgaagaagcttatcgccagattgtagctgcgttcggtccgggcattcttcgtgccgatggcgagatcgatcgccagaaactgggtgctatccgcttttcggacgaacaacaacgtaaggtgctgaatgcgattgtaggtcctgcagtcctgaagaagatgctcgctgagaaagaagctcatatccgctcaggcgccaagacggttgtgctggatatcccgctgctgttcgaatccggattgacccattgggtcgacaaagtgctcgtggtgtacgtcgatgatgatgttcagttacgccgccttatggcacgtaacgggtttactgaagaagaagctctgaagcgcattcgttcacagtggcccagtgcggagaaagttaaacgtgcagacgctgtcatcgacaataatggcacgattgaagaaacccgccgccagctgctggccattttacaccagtgggatctgctgggtaagggtgcgtccggccaccatcatcaccatcactaatga

SEQ ID NO: 3952 - protein, 211 aa, synthetic construct
  REGION 1..211: note = Variant of 3'O-kinase
MAFTIGLTGGIAAGKSTVSAMMRELGLPVIDADEAARAVMRPGEEAYRQIVAAFGPGILRADGEIDRQKLGAIRFSDEQQRKVLNAIVGPAVLKKMLAEKEAHIRSGAKTVVLDIPLLFESGLTHWVDKVLVVYVDDDVQLRRLMARNGFTEEEALKRIRSQWPSAEKVKRADAVIDNNGTIEETRRQLLAILHQWDLLGKGASGHHHHHH

SEQ ID NO: 3953 - DNA, 639 bp, synthetic construct
  misc_feature 1..639: note = Variant of 3'O-kinase
  source 1..639: mol_type = other DNA
atggcgtttaccattggtttaacaggagggatcgcagcgggcaaatcgactgtgagtgccatgatgcgtgaactgggtctgccggtcatcgatgctgacgaggcagcacgcgccgttatgcgtccaggcgaagaagcttatcgccagattgtagctgcgttcggtccgggcattcttcgtgccgatggcgagatcgatcgccagaaactgggtgctatccgcttttcggacgaacaacaacgtaaggtgctgaatgcgattgtaggtcctgcagtcctgaagaagatgctcgctgagaaagaagctcatatccgctcaggcgccaagacggttgtgctggatatcccgctgctgttcgaatccggattgacccattgggtcgacaaagtgctcgtggtgtacgtcgatgatgatgttcagttacgccgccttatggcacgtaacgggtttactgaagaagaagctctgaagcgcattcgttcacagtggcccagtgcggagaaagttaaacgtgcagacgctgtcatcgacaataatggcacgattgaagaaacccgccgccagctgctggccattttagagcagtgggatctgctgggtaagggtggctccggccaccatcatcaccatcactaatga

SEQ ID NO: 3954 - protein, 211 aa, synthetic construct
  REGION 1..211: note = Variant of 3'O-kinase
MAFTIGLTGGIAAGKSTVSAMMRELGLPVIDADEAARAVMRPGEEAYRQIVAAFGPGILRADGEIDRQKLGAIRFSDEQQRKVLNAIVGPAVLKKMLAEKEAHIRSGAKTVVLDIPLLFESGLTHWVDKVLVVYVDDDVQLRRLMARNGFTEEEALKRIRSQWPSAEKVKRADAVIDNNGTIEETRRQLLAILEQWDLLGKGGSGHHHHHH

SEQ ID NO: 3955 - DNA, 639 bp, synthetic construct
  misc_feature 1..639: note = Variant of 3'O-kinase
  source 1..639: mol_type = other DNA
atggcgtttaccattggtttaacaggagggatcgcagcgggcaaatcgactgtgagtgccatgatgcgtgaactgggtctgccggtcatcgatgctgacgaggcagcacgcgccgttatgcgtccaggcggtgaagcttatcgccagattgtagctgcgttcggtccgggcattcttcgtgccgatggcgagatcgatcgccagaaactgggtgctatccgcttttcggacgaacaacaacgtaaggtgctgaatgcgattgtaggtcctgcagtcctgaagaagatgctcgctgagaaagaagctcatatccgctcaggcgccaagacggttgtgctggatatcccgctgctgttcgaatccggattgacccattgggtcgacaaagtgctcgtggtgtacgtcgatgatgatgttcagttacgccgccttatggcacgtaacgggtttactgaagaagaagctctgaagcgcattcgttcacagtggcccagtgcggagaaagttaaacgtgcagacgctgtcatcgacaataatggcacgattgaagaaacccgccgccagctgctggccattttacaccagtgggatctgctgggtaagggtggctccggccaccatcatcaccatcactaatga

SEQ ID NO: 3956 - protein, 211 aa, synthetic construct
  REGION 1..211: note = Variant of 3'O-kinase
MAFTIGLTGGIAAGKSTVSAMMRELGLPVIDADEAARAVMRPGGEAYRQIVAAFGPGILRADGEIDRQKLGAIRFSDEQQRKVLNAIVGPAVLKKMLAEKEAHIRSGAKTVVLDIPLLFESGLTHWVDKVLVVYVDDDVQLRRLMARNGFTEEEALKRIRSQWPSAEKVKRADAVIDNNGTIEETRRQLLAILHQWDLLGKGGSGHHHHHH

SEQ ID NO: 3957 - DNA, 639 bp, synthetic construct
  misc_feature 1..639: note = Variant of 3'O-kinase
  source 1..639: mol_type = other DNA
atggcgtttaccattggtttaacaggagggatcgcagcgggcaaatcgactgtgagtgccatgatgcgtgaactgggtctgccggtcatcgatgctgacgaggcagcacgcgccgttatgcgtccaggcgaagaagcttatcgccagattgtagctgcgttcggtccgggcattcttcgtgccgatggcgagatcgatcgccagaaactgggtgctatccgcttttcggacgaacaacaacgtaaggtgctgaatgcgattgtaggtcctgcagtcctgaagaagatgctcgctgagattgaagctcatatccgctcaggcgccaagacggttgtgctggatatcccgctgctgttcgaatccggattgacccattgggtcgacaaagtgctcgtggtgtacgtcgatgatgatgttcagttacgccgccttatggcacgtaacgggtttactgaagaagaagctctgaagcgcattcgttcacagtggcccagtgcggagaaagttaaacgtgcagacgctgtcatcgacaataatggcacgattgaagaaacccgccgccagctgctggccattttacaccagtgggatctgctgggtaagggtggctccggccaccatcatcaccatcactaatga

SEQ ID NO: 3958 - protein, 211 aa, synthetic construct
  REGION 1..211: note = Variant of 3'O-kinase
MAFTIGLTGGIAAGKSTVSAMMRELGLPVIDADEAARAVMRPGEEAYRQIVAAFGPGILRADGEIDRQKLGAIRFSDEQQRKVLNAIVGPAVLKKMLAEIEAHIRSGAKTVVLDIPLLFESGLTHWVDKVLVVYVDDDVQLRRLMARNGFTEEEALKRIRSQWPSAEKVKRADAVIDNNGTIEETRRQLLAILHQWDLLGKGGSGHHHHHH

SEQ ID NO: 3959 - DNA, 639 bp, synthetic construct
  misc_feature 1..639: note = Variant of 3'O-kinase
  source 1..639: mol_type = other DNA
atggcgtttaccattggtttaacaggagggatcgcagcgggcaaatcgactgtgagtgccatgatgcgtgaactgggtctgccggtcatcgatgctgacgaggcagcacgcgccgttatgcgtccaggcgaagaagcttatcgccagattgtagctgcgttcggtccgggcattcttcgtgccgatggcgagatcgatcgccagaaactgggtgctatccgcttttcggacgaacaacaacgtaaggtgctgaatgcgattgtaggtcctgcagtcctgaagaagatgctcgctgagaaagaagctcatatccgctcaggcgccaagacggttgtgctggatatcccgctgctgttcgaatccggattgacccattggtatgacaaagtgctcgtggtgtacgtcgatgatgatgttcagttacgccgccttatggcacgtaacgggtttactgaagaagaagctctgaagcgcattcgttcacagtggcccagtgcggagaaagttaaacgtgcagacgctgtcatcgacaataatggcacgattgaagaaacccgccgccagctgctggccattttacaccagtgggatctgctgggtaagggtggctccggccaccatcatcaccatcactaatga

SEQ ID NO: 3960 - protein, 211 aa, synthetic construct
  REGION 1..211: note = Variant of 3'O-kinase
MAFTIGLTGGIAAGKSTVSAMMRELGLPVIDADEAARAVMRPGEEAYRQIVAAFGPGILRADGEIDRQKLGAIRFSDEQQRKVLNAIVGPAVLKKMLAEKEAHIRSGAKTVVLDIPLLFESGLTHWYDKVLVVYVDDDVQLRRLMARNGFTEEEALKRIRSQWPSAEKVKRADAVIDNNGTIEETRRQLLAILHQWDLLGKGGSGHHHHHH

SEQ ID NO: 3961 - DNA, 639 bp, synthetic construct
  misc_feature 1..639: note = Variant of 3'O-kinase
  source 1..639: mol_type = other DNA
atggcgtttaccattggtttaacaggagggatcgcagcgggcaaatcgactgtgagtgccatgatgcgtgaactgggtctgccggtcatcgatgctgacgaggcagcacgcgccgttatgcgtccaggcgaagaagcttatcgccagattgtagctgcgttcggtccgggcattcttcgtgccgatggcgagatcgatcgccagaaactgggtgctatccgcttttcggacgaacaacaacgtaaggtgctgaatgcgattgtaggtcctgcagtcctgaagaagatgctcgctgagaaagaagctcatatccgctcaggcgccaagacggttgtgctggatatcccgctgctgttcgaatccggattgacccattgggtcgacaaagtgctcgtggtgtacgtcgatgatgatgttcagttacgccgccttatggcacgtaacgggtttactgaagaagaagctctgaagcgcattcgttcacagtggcccagtgcggagaaagttattcgtgcagacgctgtcatcgacaataatggcacgattgaagaaacccgccgccagctgctggccattttacaccagtgggatctgctgggtaagggtggctccggccaccatcatcaccatcactaatga

SEQ ID NO: 3962 - protein, 211 aa, synthetic construct
  REGION 1..211: note = Variant of 3'O-kinase
MAFTIGLTGGIAAGKSTVSAMMRELGLPVIDADEAARAVMRPGEEAYRQIVAAFGPGILRADGEIDRQKLGAIRFSDEQQRKVLNAIVGPAVLKKMLAEKEAHIRSGAKTVVLDIPLLFESGLTHWVDKVLVVYVDDDVQLRRLMARNGFTEEEALKRIRSQWPSAEKVIRADAVIDNNGTIEETRRQLLAILHQWDLLGKGGSGHHHHHH

SEQ ID NO: 3963 - DNA, 639 bp, synthetic construct
  misc_feature 1..639: note = Variant of 3'O-kinase
  source 1..639: mol_type = other DNA
atggcgtttacctatggtttaacaggagggatcgcagcgggcaaatcgactgtgagtgccatgatgcgtgaactgggtctgccggtcatcgatgctgacgaggcagcacgcgccgttatgcgtccaggcgaagaagcttatcgccagattgtagctgcgttcggtccgggcattcttcgtgccgatggcgagatcgatcgccagaaactgggtgctatccgcttttcggacgaacaacaacgtaaggtgctgaatgcgattgtaggtcctgcagtcctgaagaagatgctcgctgagaaagaagctcatatccgctcaggcgccaagacggttgtgctggatatcccgctgctgttcgaatccggattgacccattgggtcgacaaagtgctcgtggtgtacgtcgatgatgatgttcagttacgccgccttatggcacgtaacgggtttactgaagaagaagctctgaagcgcattcgttcacagtggcccagtgcggagaaagttaaacgtgcagacgctgtcatcgacaataatggcacgattgaagaaacccgccgccagctgctggccattttacaccagtgggatctgctgggtaagggtggctccggccaccatcatcaccatcactaatga

SEQ ID NO: 3964 - protein, 211 aa, synthetic construct
  REGION 1..211: note = Variant of 3'O-kinase
MAFTYGLTGGIAAGKSTVSAMMRELGLPVIDADEAARAVMRPGEEAYRQIVAAFGPGILRADGEIDRQKLGAIRFSDEQQRKVLNAIVGPAVLKKMLAEKEAHIRSGAKTVVLDIPLLFESGLTHWVDKVLVVYVDDDVQLRRLMARNGFTEEEALKRIRSQWPSAEKVKRADAVIDNNGTIEETRRQLLAILHQWDLLGKGGSGHHHHHH

SEQ ID NO: 3965 - DNA, 639 bp, synthetic construct
  misc_feature 1..639: note = Variant of 3'O-kinase
  source 1..639: mol_type = other DNA
atggcgtttaccattggtttaacaggagggatcgcagcgggcaaatcgactgtgagtgccatgatgcgtgaactgggtctgccggtcatcgatgctgacgaggcagcacgcgccgttatgcgtccaggcgaagaagcttatcgccagattgtagctgcgttcggtccgggcattcttcgtgccgatggcgagatcgatcgccagaaactgggtgctatccgcttttcggacgaacaacaacgtaaggtgctgaatgcgattgtaggtcctgcagtcctgaagaagatgctcgctgagaaagaagctcatatccgctcaggcgccaagacggttgtgctggatatcccgctgctgttcgaatccggattgacccattgggtcgacaaagtgctcgtggtgtacgtcgatgatgatgttcagttacgccgccttatggcacgtaacttttttactgaagaagaagctctgaagcgcattcgttcacagtggcccagtgcggagaaagttaaacgtgcagacgctgtcatcgacaataatggcacgattgaagaaacccgccgccagctgctggccattttacaccagtgggatctgctgggtaagggtggctccggccaccatcatcaccatcactaatga

SEQ ID NO: 3966 - protein, 211 aa, synthetic construct
  REGION 1..211: note = Variant of 3'O-kinase
MAFTIGLTGGIAAGKSTVSAMMRELGLPVIDADEAARAVMRPGEEAYRQIVAAFGPGILRADGEIDRQKLGAIRFSDEQQRKVLNAIVGPAVLKKMLAEKEAHIRSGAKTVVLDIPLLFESGLTHWVDKVLVVYVDDDVQLRRLMARNFFTEEEALKRIRSQWPSAEKVKRADAVIDNNGTIEETRRQLLAILHQWDLLGKGGSGHHHHHH

SEQ ID NO: 3967 - DNA, 639 bp, synthetic construct
  misc_feature 1..639: note = Variant of 3'O-kinase
  source 1..639: mol_type = other DNA
atggcgtttaccattggtttaacaggagggatcgcagcgggcaaatcgactgtgagtgccatgatgcgtgaactgggtctgccggtcatcgatgctgacgaggcagcacgcgccgttatgcgtccaggcgaagaagcttatcgccagattactgctgcgttcggtccgggcattcttcgtgccgatggcgagatcgatcgccagaaactgggtgctatccgcttttcggacgaacaacaacgtaaggtgctgaatgcgattgtaggtcctgcagtcctgaagaagatgctcgctgagaaagaagctcatatccgctcaggcgccaagacggttgtgctggatatcccgctgctgttcgaatccggattgacccattgggtcgacaaagtgctcgtggtgtacgtcgatgatgatgttcagttacgccgccttatggcacgtaacgggtttactgaagaagaagctctgaagcgcattcgttcacagtggcccagtgcggagaaagttaaacgtgcagacgctgtcatcgacaataatggcacgattgaagaaacccgccgccagctgctggccattttacaccagtgggatctgctgggtaagggtggctccggccaccatcatcaccatcactaatga

SEQ ID NO: 3968 - protein, 211 aa, synthetic construct
  REGION 1..211: note = Variant of 3'O-kinase
MAFTIGLTGGIAAGKSTVSAMMRELGLPVIDADEAARAVMRPGEEAYRQITAAFGPGILRADGEIDRQKLGAIRFSDEQQRKVLNAIVGPAVLKKMLAEKEAHIRSGAKTVVLDIPLLFESGLTHWVDKVLVVYVDDDVQLRRLMARNGFTEEEALKRIRSQWPSAEKVKRADAVIDNNGTIEETRRQLLAILHQWDLLGKGGSGHHHHHH

SEQ ID NO: 3969 - DNA, 639 bp, synthetic construct
  misc_feature 1..639: note = Variant of 3'O-kinase
  source 1..639: mol_type = other DNA
atggcgtttaccattggtttaacaggagggatcgcagcgggcaaatcgactgtgagtgccatgatgcgtgaactgggtctgccggtcatcgatgctgacgaggcagcacgcgccgttatgcgtccaggcgaagaagcttatcgccagattgtagctgcgttcggtccgtggattcttcgtgccgatggcgagatcgatcgccagaaactgggtgctatccgcttttcggacgaacaacaacgtaaggtgctgaatgcgattgtaggtcctgcagtcctgaagaagatgctcgctgagaaagaagctcatatccgctcaggcgccaagacggttgtgctggatatcccgctgctgttcgaatccggattgacccattgggtcgacaaagtgctcgtggtgtacgtcgatgatgatgttcagttacgccgccttatggcacgtaacgggtttactgaagaagaagctctgaagcgcattcgttcacagtggcccagtgcggagaaagttaaacgtgcagacgctgtcatcgacaataatggcacgattgaagaaacccgccgccagctgctggccattttacaccagtgggatctgctgggtaagggtggctccggccaccatcatcaccatcactaatga

SEQ ID NO: 3970 - protein, 211 aa, synthetic construct
  REGION 1..211: note = Variant of 3'O-kinase
MAFTIGLTGGIAAGKSTVSAMMRELGLPVIDADEAARAVMRPGEEAYRQIVAAFGPWILRADGEIDRQKLGAIRFSDEQQRKVLNAIVGPAVLKKMLAEKEAHIRSGAKTVVLDIPLLFESGLTHWVDKVLVVYVDDDVQLRRLMARNGFTEEEALKRIRSQWPSAEKVKRADAVIDNNGTIEETRRQLLAILHQWDLLGKGGSGHHHHHH

SEQ ID NO: 3971 - DNA, 639 bp, synthetic construct
  misc_feature 1..639: note = Variant of 3'O-kinase
  source 1..639: mol_type = other DNA
atggcgtttaccattggtttaacaggagggatcgcagcgggcaaatcgactgtgagtgccatgatgcgtgaactgggtctgccggtcatcgatgctgacgaggcagcacgcgccgttatgcgtccaggcgaagaagcttatcgccagattgtagctgcgttcggtccgggcattcttcgtgccgatggcgagatcgatcgccagaaactgggtgctatccgcttttcggacgaacaacaacgtaaggtgctgaatgcgattgtaggtcctgcagtcctgaagaagatgctcgctgagaaagaagctcattatcgctcaggcgccaagacggttgtgctggatatcccgctgctgttcgaatccggattgacccattgggtcgacaaagtgctcgtggtgtacgtcgatgatgatgttcagttacgccgccttatggcacgtaacgggtttactgaagaagaagctctgaagcgcattcgttcacagtggcccagtgcggagaaagttaaacgtgcagacgctgtcatcgacaataatggcacgattgaagaaacccgccgccagctgctggccattttacaccagtgggatctgctgggtaagggtggctccggccaccatcatcaccatcactaatga

SEQ ID NO: 3972 - protein, 211 aa, synthetic construct
  REGION 1..211: note = Variant of 3'O-kinase
MAFTIGLTGGIAAGKSTVSAMMRELGLPVIDADEAARAVMRPGEEAYRQIVAAFGPGILRADGEIDRQKLGAIRFSDEQQRKVLNAIVGPAVLKKMLAEKEAHYRSGAKTVVLDIPLLFESGLTHWVDKVLVVYVDDDVQLRRLMARNGFTEEEALKRIRSQWPSAEKVKRADAVIDNNGTIEETRRQLLAILHQWDLLGKGGSGHHHHHH

SEQ ID NO: 3973 - DNA, 639 bp, synthetic construct
  misc_feature 1..639: note = Variant of 3'O-kinase
  source 1..639: mol_type = other DNA
atggcgtttaccattggtttaacaggagggatcgcagcgggcaaatcgactgtgagtgccatgatgcgtgaactgggtctgccggtcatcgatgctgacgaggcagcacgcgccgttatgcgtccaggcgaagaagctggtcgccagattgtagctgcgttcggtccgggcattcttcgtgccgatggcgagatcgatcgccagaaactgggtgctatccgcttttcggacgaacaacaacgtaaggtgctgaatgcgattgtaggtcctgcagtcctgaagaagatgctcgctgagaaagaagctcatatccgctcaggcgccaagacggttgtgctggatatcccgctgctgttcgaatccggattgacccattgggtcgacaaagtgctcgtggtgtacgtcgatgatgatgttcagttacgccgccttatggcacgtaacgggtttactgaagaagaagctctgaagcgcattcgttcacagtggcccagtgcggagaaagttaaacgtgcagacgctgtcatcgacaataatggcacgattgaagaaacccgccgccagctgctggccattttacaccagtgggatctgctgggtaagggtggctccggccaccatcatcaccatcactaatga

SEQ ID NO: 3974 - protein, 211 aa, synthetic construct
  REGION 1..211: note = Variant of 3'O-kinase
MAFTIGLTGGIAAGKSTVSAMMRELGLPVIDADEAARAVMRPGEEAGRQIVAAFGPGILRADGEIDRQKLGAIRFSDEQQRKVLNAIVGPAVLKKMLAEKEAHIRSGAKTVVLDIPLLFESGLTHWVDKVLVVYVDDDVQLRRLMARNGFTEEEALKRIRSQWPSAEKVKRADAVIDNNGTIEETRRQLLAILHQWDLLGKGGSGHHHHHH

SEQ ID NO: 3975 - DNA, 639 bp, synthetic construct
  misc_feature 1..639: note = Variant of 3'O-kinase
  source 1..639: mol_type = other DNA
atggcgtttaccattggtttaacaggagggatcgcagcgggcaaatcgactgtgagtgccatgatgcgtgaactgggtctgccggtcatcgatgctgacgaggcagcacgcgccgttatgcgtccaggcgaagaagcttatcgccagattgtagctgcgttcggtccgggcattcttcgtgccgatggcgagatcgatcgccagaaactgggtgctatccgcttttcggacgaacaacaacgtaaggtgctgaatgcgattgtaggtcctgcagtcctgaagaagatgctcgctgagaaaattgctcatatccgctcaggcgccaagacggttgtgctggatatcccgctgctgttcgaatccggattgacccattgggtcgacaaagtgctcgtggtgtacgtcgatgatgatgttcagttacgccgccttatggcacgtaacgggtttactgaagaagaagctctgaagcgcattcgttcacagtggcccagtgcggagaaagttaaacgtgcagacgctgtcatcgacaataatggcacgattgaagaaacccgccgccagctgctggccattttacaccagtgggatctgctgggtaagggtggctccggccaccatcatcaccatcactaatga

SEQ ID NO: 3976 - protein, 211 aa, synthetic construct
  REGION 1..211: note = Variant of 3'O-kinase
MAFTIGLTGGIAAGKSTVSAMMRELGLPVIDADEAARAVMRPGEEAYRQIVAAFGPGILRADGEIDRQKLGAIRFSDEQQRKVLNAIVGPAVLKKMLAEKIAHIRSGAKTVVLDIPLLFESGLTHWVDKVLVVYVDDDVQLRRLMARNGFTEEEALKRIRSQWPSAEKVKRADAVIDNNGTIEETRRQLLAILHQWDLLGKGGSGHHHHHH

SEQ ID NO: 3977 - DNA, 639 bp, synthetic construct
  misc_feature 1..639: note = Variant of 3'O-kinase
  source 1..639: mol_type = other DNA
atggcgtttaccattggtttaacaggagggatcgcagcgggcaaatcgactgtgagtgccatgatgcgtgaactgggtctgccggtcatcgatgctgacgaggcagcacgcgccgttatgcgtccaggcgaagaagcttatcgccagattgtaattgcgttcggtccgggcattcttcgtgccgatggcgagatcgatcgccagaaactgggtgctatccgcttttcggacgaacaacaacgtaaggtgctgaatgcgattgtaggtcctgcagtcctgaagaagatgctcgctgagaaagaagctcatatccgctcaggcgccaagacggttgtgctggatatcccgctgctgttcgaatccggattgacccattgggtcgacaaagtgctcgtggtgtacgtcgatgatgatgttcagttacgccgccttatggcacgtaacgggtttactgaagaagaagctctgaagcgcattcgttcacagtggcccagtgcggagaaagttaaacgtgcagacgctgtcatcgacaataatggcacgattgaagaaacccgccgccagctgctggccattttacaccagtgggatctgctgggtaagggtggctccggccaccatcatcaccatcactaatga

SEQ ID NO: 3978 - protein, 211 aa, synthetic construct
  REGION 1..211: note = Variant of 3'O-kinase
MAFTIGLTGGIAAGKSTVSAMMRELGLPVIDADEAARAVMRPGEEAYRQIVIAFGPGILRADGEIDRQKLGAIRFSDEQQRKVLNAIVGPAVLKKMLAEKEAHIRSGAKTVVLDIPLLFESGLTHWVDKVLVVYVDDDVQLRRLMARNGFTEEEALKRIRSQWPSAEKVKRADAVIDNNGTIEETRRQLLAILHQWDLLGKGGSGHHHHHH

SEQ ID NO: 3979 - DNA, 639 bp, synthetic construct
  misc_feature 1..639: note = Variant of 3'O-kinase
  source 1..639: mol_type = other DNA
atggcgtttaccattggtttaacaggagggatcgcagcgggcaaatcgactgtgagtgccatgatgcgtgaactgggtctgccggtcatcgatgctgacgaggcagcacgcgccgttatgcgtccaggcgaagaagcttatcgccagattgtagctgcgttcggtccgggcattcttcgtgccgatacggagatcgatcgccagaaactgggtgctatccgcttttcggacgaacaacaacgtaaggtgctgaatgcgattgtaggtcctgcagtcctgaagaagatgctcgctgagaaagaagctcatatccgctcaggcgccaagacggttgtgctggatatcccgctgctgttcgaatccggattgacccattgggtcgacaaagtgctcgtggtgtacgtcgatgatgatgttcagttacgccgccttatggcacgtaacgggtttactgaagaagaagctctgaagcgcattcgttcacagtggcccagtgcggagaaagttaaacgtgcagacgctgtcatcgacaataatggcacgattgaagaaacccgccgccagctgctggccattttacaccagtgggatctgctgggtaagggtggctccggccaccatcatcaccatcactaatga

SEQ ID NO: 3980 - protein, 211 aa, synthetic construct
  REGION 1..211: note = Variant of 3'O-kinase
MAFTIGLTGGIAAGKSTVSAMMRELGLPVIDADEAARAVMRPGEEAYRQIVAAFGPGILRADTEIDRQKLGAIRFSDEQQRKVLNAIVGPAVLKKMLAEKEAHIRSGAKTVVLDIPLLFESGLTHWVDKVLVVYVDDDVQLRRLMARNGFTEEEALKRIRSQWPSAEKVKRADAVIDNNGTIEETRRQLLAILHQWDLLGKGGSGHHHHHH

SEQ ID NO: 3981 - DNA, 639 bp, synthetic construct
  misc_feature 1..639: note = Variant of 3'O-kinase
  source 1..639: mol_type = other DNA
atggcgtttaccattggtttaacaggagggatcgcagcgggcaaatcgactgtgagtgccatgatgcgtgaactgggtctgccggtcatcgatgctgacgaggcagcacgcgccgttatgcgtccaggcgaagaagcttatcgccagattgtagctgcgttcggtccgggcattctttgtgccgatggcgagatcgatcgccagaaactgggtgctatccgcttttcggacgaacaacaacgtaaggtgctgaatgcgattgtaggtcctgcagtcctgaagaagatgctcgctgagaaagaagctcatatccgctcaggcgccaagacggttgtgctggatatcccgctgctgttcgaatccggattgacccattgggtcgacaaagtgctcgtggtgtacgtcgatgatgatgttcagttacgccgccttatggcacgtaacgggtttactgaagaagaagctctgaagcgcattcgttcacagtggcccagtgcggagaaagttaaacgtgcagacgctgtcatcgacaataatggcacgattgaagaaacccgccgccagctgctggccattttacaccagtgggatctgctgggtaagggtggctccggccaccatcatcaccatcactaatga

SEQ ID NO: 3982 - protein, 211 aa, synthetic construct
  REGION 1..211: note = Variant of 3'O-kinase
MAFTIGLTGGIAAGKSTVSAMMRELGLPVIDADEAARAVMRPGEEAYRQIVAAFGPGILCADGEIDRQKLGAIRFSDEQQRKVLNAIVGPAVLKKMLAEKEAHIRSGAKTVVLDIPLLFESGLTHWVDKVLVVYVDDDVQLRRLMARNGFTEEEALKRIRSQWPSAEKVKRADAVIDNNGTIEETRRQLLAILHQWDLLGKGGSGHHHHHH

SEQ ID NO: 3983 - DNA, 639 bp, synthetic construct
  misc_feature 1..639: note = Variant of 3'O-kinase
  source 1..639: mol_type = other DNA
atggcgtttaccattggtttaacaggagggatcgcagcgggcaaatcgactgtgagtgccatgatgcgtgaactgggtctgccggtcatcgatgctgacgaggcagcacgcgccgttatgcgtccaggcgaagaagcttatcgccagattgtagctgcgttcggtccgggcattcttcgtgccgatggcgagatcgatcgccagaaactgggtgctatccgcttttcggacgaacaacaacgtaaggtgctgaatgcgattgtaggtcctgcagtcctgaagaagatgctcgctgagaaagaagctcatatccgctcaggcgccaagacggttgtgctggatatcccgctgctgttcgaatccggattgacccatccggtcgacaaagtgctcgtggtgtacgtcgatgatgatgttcagttacgccgccttatggcacgtaacgggtttactgaagaagaagctctgaagcgcattcgttcacagtggcccagtgcggagaaagttaaacgtgcagacgctgtcatcgacaataatggcacgattgaagaaacccgccgccagctgctggccattttacaccagtgggatctgctgggtaagggtggctccggccaccatcatcaccatcactaatga

SEQ ID NO: 3984 - protein, 211 aa, synthetic construct
  REGION 1..211: note = Variant of 3'O-kinase
MAFTIGLTGGIAAGKSTVSAMMRELGLPVIDADEAARAVMRPGEEAYRQIVAAFGPGILRADGEIDRQKLGAIRFSDEQQRKVLNAIVGPAVLKKMLAEKEAHIRSGAKTVVLDIPLLFESGLTHPVDKVLVVYVDDDVQLRRLMARNGFTEEEALKRIRSQWPSAEKVKRADAVIDNNGTIEETRRQLLAILHQWDLLGKGGSGHHHHHH

SEQ ID NO: 3985 - DNA, 639 bp, synthetic construct
  misc_feature 1..639: note = Variant of 3'O-kinase
  source 1..639: mol_type = other DNA
atggcgtttaccattggtttaacaggagggatcgcagcgggcaaatcgactgtgagtgccatgatgcgtgaactgggtctgccggtcatcgatgctgacgaggcagcacgcgccgttatgcgtccaggcgaagaagcttatcgccagattgtagctgcgttcggtccgggcattcttcgtgccgatggcgagatcgatcgccagaaactgggtgctatccgcttttcggacgaacaacaacgtaaggtgctgaatgcgattgtaggtcctgcagtcctgaagaagatgctcgctgagaaagaagctcatgcgcgctcaggcgccaagacggttgtgctggatatcccgctgctgttcgaatccggattgacccattgggtcgacaaagtgctcgtggtgtacgtcgatgatgatgttcagttacgccgccttatggcacgtaacgggtttactgaagaagaagctctgaagcgcattcgttcacagtggcccagtgcggagaaagttaaacgtgcagacgctgtcatcgacaataatggcacgattgaagaaacccgccgccagctgctggccattttacaccagtgggatctgctgggtaagggtggctccggccaccatcatcaccatcactaatga

SEQ ID NO: 3986 - protein, 211 aa, synthetic construct
  REGION 1..211: note = Variant of 3'O-kinase
MAFTIGLTGGIAAGKSTVSAMMRELGLPVIDADEAARAVMRPGEEAYRQIVAAFGPGILRADGEIDRQKLGAIRFSDEQQRKVLNAIVGPAVLKKMLAEKEAHARSGAKTVVLDIPLLFESGLTHWVDKVLVVYVDDDVQLRRLMARNGFTEEEALKRIRSQWPSAEKVKRADAVIDNNGTIEETRRQLLAILHQWDLLGKGGSGHHHHHH

SEQ ID NO: 3987 - DNA, 639 bp, synthetic construct
  misc_feature 1..639: note = Variant of 3'O-kinase
  source 1..639: mol_type = other DNA
atggcgtttaccattggtttaacaggagggatcgcagcgggcaaatcgactgtgagtgccatgatgcgtgaactgggtctgccggtcatcgatgctgacgaggcagcacgcgccgttatgcgtccaggcgaagaagcttatcgccagattgtagctgcgttcggtccgggcattcttcgtgccgatggcgagatcgatcgccagaaactgggtgctatccgcttttcggacgaacaacaacgtaaggtgctgaatgcgattgtaggtcctgcagtcctgaagaagatgctcgctgagaaagaagctcatatccgctcaggcgccaagacggttgtgctggatatcccgctgctgttcgaatccggattgacccattgggtcgacaaagtgctcgtggtgtacgtcgatgatgatgttcagttacgccgccttatggcacgtaacgggtttactgaagaagaagctctgaagcgcattcgttcacagtggcccagtgcggagaaagttaaacgtgcagacgctgtcatcgacaataatggcacgattgaagaaacccgccgccagctgctggccattttacaccagtggaagctgctgggtaagggtggctccggccaccatcatcaccatcactaatga

SEQ ID NO: 3988 - protein, 211 aa, synthetic construct
  REGION 1..211: note = Variant of 3'O-kinase
MAFTIGLTGGIAAGKSTVSAMMRELGLPVIDADEAARAVMRPGEEAYRQIVAAFGPGILRADGEIDRQKLGAIRFSDEQQRKVLNAIVGPAVLKKMLAEKEAHIRSGAKTVVLDIPLLFESGLTHWVDKVLVVYVDDDVQLRRLMARNGFTEEEALKRIRSQWPSAEKVKRADAVIDNNGTIEETRRQLLAILHQWKLLGKGGSGHHHHHH

SEQ ID NO: 3989 - DNA, 639 bp, synthetic construct
  misc_feature 1..639: note = Variant of 3'O-kinase
  source 1..639: mol_type = other DNA
atggcgtttaccattggtttaacaggagggatcgcagcgggcaaatcgactgtgagtgccatgatgcgtgaactgggtctgccggtcatcgatgctgacgagtctgcacgcgccgttatgcgtccaggcgaagaagcttatcgccagattgtagctgcgttcggtccgggcattcttcgtgccgatggcgagatcgatcgccagaaactgggtgctatccgcttttcggacgaacaacaacgtaaggtgctgaatgcgattgtaggtcctgcagtcctgaagaagatgctcgctgagaaagaagctcatatccgctcaggcgccaagacggttgtgctggatatcccgctgctgttcgaatccggattgacccattgggtcgacaaagtgctcgtggtgtacgtcgatgatgatgttcagttacgccgccttatggcacgtaacgggtttactgaagaagaagctctgaagcgcattcgttcacagtggcccagtgcggagaaagttaaacgtgcagacgctgtcatcgacaataatggcacgattgaagaaacccgccgccagctgctggccattttacaccagtgggatctgctgggtaagggtggctccggccaccatcatcaccatcactaatga

SEQ ID NO: 3990 - protein, 211 aa, synthetic construct
  REGION 1..211: note = Variant of 3'O-kinase
MAFTIGLTGGIAAGKSTVSAMMRELGLPVIDADESARAVMRPGEEAYRQIVAAFGPGILRADGEIDRQKLGAIRFSDEQQRKVLNAIVGPAVLKKMLAEKEAHIRSGAKTVVLDIPLLFESGLTHWVDKVLVVYVDDDVQLRRLMARNGFTEEEALKRIRSQWPSAEKVKRADAVIDNNGTIEETRRQLLAILHQWDLLGKGGSGHHHHHH

SEQ ID NO: 3991 - DNA, 639 bp, synthetic construct
  misc_feature 1..639: note = Variant of 3'O-kinase
  source 1..639: mol_type = other DNA
atggcgtttaccatttttttaacaggagggatcgcagcgggcaaatcgactgtgagtgccatgatgcgtgaactgggtctgccggtcatcgatgctgacgaggcagcacgcgccgttatgcgtccaggcgaagaagcttatcgccagattgtagctgcgttcggtccgggcattcttcgtgccgatggcgagatcgatcgccagaaactgggtgctatccgcttttcggacgaacaacaacgtaaggtgctgaatgcgattgtaggtcctgcagtcctgaagaagatgctcgctgagaaagaagctcatatccgctcaggcgccaagacggttgtgctggatatcccgctgctgttcgaatccggattgacccattgggtcgacaaagtgctcgtggtgtacgtcgatgatgatgttcagttacgccgccttatggcacgtaacgggtttactgaagaagaagctctgaagcgcattcgttcacagtggcccagtgcggagaaagttaaacgtgcagacgctgtcatcgacaataatggcacgattgaagaaacccgccgccagctgctggccattttacaccagtgggatctgctgggtaagggtggctccggccaccatcatcaccatcactaatga

SEQ ID NO: 3992 - protein, 211 aa, synthetic construct
  REGION 1..211: note = Variant of 3'O-kinase
MAFTIFLTGGIAAGKSTVSAMMRELGLPVIDADEAARAVMRPGEEAYRQIVAAFGPGILRADGEIDRQKLGAIRFSDEQQRKVLNAIVGPAVLKKMLAEKEAHIRSGAKTVVLDIPLLFESGLTHWVDKVLVVYVDDDVQLRRLMARNGFTEEEALKRIRSQWPSAEKVKRADAVIDNNGTIEETRRQLLAILHQWDLLGKGGSGHHHHHH

SEQ ID NO: 3993 - DNA, 639 bp, synthetic construct
  misc_feature 1..639: note = Variant of 3'O-kinase
  source 1..639: mol_type = other DNA
atggcgtttaccattggtttaacaggagggatcgcagcgggcaaatcgactgtgagtgccatgatgcgtgaactgggtctgccggtcatcgatgctgacgaggcagcacgcgccgttatgcgtccaggcgaagaagcttatcgccagattgtagctgcgttcggtccgggcattcttcgtgccgatggcgagatcgatcgccagaaactgggtgctatccgcttttcggacgaacaacaacgtaaggtgctgaatgcgattgtaggtcctgcagtcctgaagaagatgctcgctgagaaagaagctcatatcatttcaggcgccaagacggttgtgctggatatcccgctgctgttcgaatccggattgacccattgggtcgacaaagtgctcgtggtgtacgtcgatgatgatgttcagttacgccgccttatggcacgtaacgggtttactgaagaagaagctctgaagcgcattcgttcacagtggcccagtgcggagaaagttaaacgtgcagacgctgtcatcgacaataatggcacgattgaagaaacccgccgccagctgctggccattttacaccagtgggatctgctgggtaagggtggctccggccaccatcatcaccatcactaatga

SEQ ID NO: 3994 - protein, 211 aa, synthetic construct
  REGION 1..211: note = Variant of 3'O-kinase
MAFTIGLTGGIAAGKSTVSAMMRELGLPVIDADEAARAVMRPGEEAYRQIVAAFGPGILRADGEIDRQKLGAIRFSDEQQRKVLNAIVGPAVLKKMLAEKEAHIISGAKTVVLDIPLLFESGLTHWVDKVLVVYVDDDVQLRRLMARNGFTEEEALKRIRSQWPSAEKVKRADAVIDNNGTIEETRRQLLAILHQWDLLGKGGSGHHHHHH

SEQ ID NO: 3995 - DNA, 639 bp, synthetic construct
  misc_feature 1..639: note = Variant of 3'O-kinase
  source 1..639: mol_type = other DNA
atggcgtttaccattggtttaacaggagggatcgcagcgggcaaatcgactgtgagtgccatgatgcgtgaactgggtctgccggtcatcgatgctgacgaggcagcacgcgccgttatgcgtccaggcgaagaagcttatcgccagattgtagctgcgttcggtccgggcattcttcgtgccgatggcgagatcgatcgccagaaactgggtgctatccgcttttcggacgaacaacaacgtaaggtgctgaatgcgattgtaggtcctgcagtcctgaagaagatgctcgctgagaaagaagctcatggtcgctcaggcgccaagacggttgtgctggatatcccgctgctgttcgaatccggattgacccattgggtcgacaaagtgctcgtggtgtacgtcgatgatgatgttcagttacgccgccttatggcacgtaacgggtttactgaagaagaagctctgaagcgcattcgttcacagtggcccagtgcggagaaagttaaacgtgcagacgctgtcatcgacaataatggcacgattgaagaaacccgccgccagctgctggccattttacaccagtgggatctgctgggtaagggtggctccggccaccatcatcaccatcactaatga

SEQ ID NO: 3996 - protein, 211 aa, synthetic construct
  REGION 1..211: note = Variant of 3'O-kinase
MAFTIGLTGGIAAGKSTVSAMMRELGLPVIDADEAARAVMRPGEEAYRQIVAAFGPGILRADGEIDRQKLGAIRFSDEQQRKVLNAIVGPAVLKKMLAEKEAHGRSGAKTVVLDIPLLFESGLTHWVDKVLVVYVDDDVQLRRLMARNGFTEEEALKRIRSQWPSAEKVKRADAVIDNNGTIEETRRQLLAILHQWDLLGKGGSGHHHHHH

SEQ ID NO: 3997 - DNA, 639 bp, synthetic construct
  misc_feature 1..639: note = Variant of 3'O-kinase
  source 1..639: mol_type = other DNA
atggcgtttaccattggtttaacaggagggatcgcagcgggcaaatcgactgtgagtgccatgatgcgtgaactgggtctgccggtcatcgatgctgacgaggcagcacgcgccgttatgcgtccaggcgaagaagcttatcgccagattgtagctgcgttcggtccgggcattcttcgtgccgatggcgagatcgatcgccagaaactgggtgctatccgcttttcggacgaacaacaacgtaaggtgctgaatgcgattgtaggtcctgcagtcctgaagaagatgctcgctgagaaagaagctcatatcatgtcaggcgccaagacggttgtgctggatatcccgctgctgttcgaatccggattgacccattgggtcgacaaagtgctcgtggtgtacgtcgatgatgatgttcagttacgccgccttatggcacgtaacgggtttactgaagaagaagctctgaagcgcattcgttcacagtggcccagtgcggagaaagttaaacgtgcagacgctgtcatcgacaataatggcacgattgaagaaacccgccgccagctgctggccattttacaccagtgggatctgctgggtaagggtggctccggccaccatcatcaccatcactaatga

SEQ ID NO: 3998 - protein, 211 aa, synthetic construct
  REGION 1..211: note = Variant of 3'O-kinase
MAFTIGLTGGIAAGKSTVSAMMRELGLPVIDADEAARAVMRPGEEAYRQIVAAFGPGILRADGEIDRQKLGAIRFSDEQQRKVLNAIVGPAVLKKMLAEKEAHIMSGAKTVVLDIPLLFESGLTHWVDKVLVVYVDDDVQLRRLMARNGFTEEEALKRIRSQWPSAEKVKRADAVIDNNGTIEETRRQLLAILHQWDLLGKGGSGHHHHHH

SEQ ID NO: 3999 - DNA, 639 bp, synthetic construct
  misc_feature 1..639: note = Variant of 3'O-kinase
  source 1..639: mol_type = other DNA
atggcgtttaccattggtttaacaggagggatcgcagcgggcaaatcgactgtgagtgccatgatgcgtgaactgggtctgccggtcatcgatgctgacgaggcagcacgcgccgttatgcgtccaggcgaagaagcttatcgccagattgtagctgcgttcggtccgggcattcttcgtgccgatggcgagatcgatcgccagaaactgggtgctatccgcttttcggacgaacaacaacgtaaggtgctgaatgcgattgtaggtcctgcagtcctgaagaagatgctcgctgagaaagaagctcatatccgctcaggcgccaagacggttgtgctggatatcccgctgctgttcgaatccggattgacccattgggtcgacaaagtgctcgtggtgtacgtcgatgatgatgttcagttacgccgccttatggcacgtaacgggtttactgaagaagaagctctgaagcgcattcgttcacagtggcccagtgcggagaaagtttatcgtgcagacgctgtcatcgacaataatggcacgattgaagaaacccgccgccagctgctggccattttacaccagtgggatctgctgggtaagggtggctccggccaccatcatcaccatcactaatga

SEQ ID NO: 4000 - protein, 211 aa, synthetic construct
  REGION 1..211: note = Variant of 3'O-kinase
MAFTIGLTGGIAAGKSTVSAMMRELGLPVIDADEAARAVMRPGEEAYRQIVAAFGPGILRADGEIDRQKLGAIRFSDEQQRKVLNAIVGPAVLKKMLAEKEAHIRSGAKTVVLDIPLLFESGLTHWVDKVLVVYVDDDVQLRRLMARNGFTEEEALKRIRSQWPSAEKVYRADAVIDNNGTIEETRRQLLAILHQWDLLGKGGSGHHHHHH

SEQ ID NO: 4001 - DNA, 639 bp, synthetic construct
  misc_feature 1..639: note = Variant of 3'O-kinase
  source 1..639: mol_type = other DNA
atggcgtttaccattggtttaacaggagggatcgcagcgggcaaatcgactgtgagtgccatgatgcgtgaactgggtctgccggtcatcgatgctgacgaggcagcacgcgccgttatgcgtccaggcgaagaagcttatcgccagattgtagctgcgttcggtccgggcattcttcgtgccgatggcgagatcgatcgccagaaactgggtgctatccgcttttcggacgaacaacaacgtaaggtgctgaatgcgattgtaggtcctgcagtcctgaagaagatgctcgctgagaaagaagctcatatccgctcaggcgccaagacggttgtgctggatatcccgctgctgttcgaatccggattgacccattgggtcgacaaagtgctcgtggtgtacgtcgatgatgatgttcagttacgccgccttatggcacgtaacgggtttactgaagaagaagctctgaagcgcattcgttcacagtggcccagtgcggagaaagttaaacgtgcagacgctgtcatcgacaataatggcacgattgaagaaacccgccgccagctgctggccattttacaccagtgggatctgctgggtaagggtggccggggccaccatcatcaccatcactaatga

SEQ ID NO: 4002 - protein, 211 aa, synthetic construct
  REGION 1..211: note = Variant of 3'O-kinase
MAFTIGLTGGIAAGKSTVSAMMRELGLPVIDADEAARAVMRPGEEAYRQIVAAFGPGILRADGEIDRQKLGAIRFSDEQQRKVLNAIVGPAVLKKMLAEKEAHIRSGAKTVVLDIPLLFESGLTHWVDKVLVVYVDDDVQLRRLMARNGFTEEEALKRIRSQWPSAEKVKRADAVIDNNGTIEETRRQLLAILHQWDLLGKGGRGHHHHHH

SEQ ID NO: 4003 - DNA, 639 bp, synthetic construct
  misc_feature 1..639: note = Variant of 3'O-kinase
  source 1..639: mol_type = other DNA
atggcgtttaccattggtttaacaggagggatcgcagcgggcaaatcgactgtgagtgccatgatgcgtgaactgggtctgccggtcatcgatgctgacgaggcagcacgcgccgttatgcgtccaggcgaagaagcttatcgccagattgtagctgcgttcggtccgggcattcttcgtgccgatggcgagatcgatcgccagaaactgggtgctatccgcttttcggacgaacaacaacgtaaggtgctgaatgcgattgtaggtcctgcagtcctgaagaagatgctcgctgagaaagaagctcatatccgctcaggcgccaagacggttgtgctggatatcccgctgctgttcgaatccggattgacccattgggtcgacaaagtgctcgtggtgtacgtcgatgatgatgttcagttacgccgccttatggcacgtaacctttttactgaagaagaagctctgaagcgcattcgttcacagtggcccagtgcggagaaagttaaacgtgcagacgctgtcatcgacaataatggcacgattgaagaaacccgccgccagctgctggccattttacaccagtgggatctgctgggtaagggtggctccggccaccatcatcaccatcactaatga

SEQ ID NO: 4004 - protein, 211 aa, synthetic construct
  REGION 1..211: note = Variant of 3'O-kinase
MAFTIGLTGGIAAGKSTVSAMMRELGLPVIDADEAARAVMRPGEEAYRQIVAAFGPGILRADGEIDRQKLGAIRFSDEQQRKVLNAIVGPAVLKKMLAEKEAHIRSGAKTVVLDIPLLFESGLTHWVDKVLVVYVDDDVQLRRLMARNLFTEEEALKRIRSQWPSAEKVKRADAVIDNNGTIEETRRQLLAILHQWDLLGKGGSGHHHHHH

SEQ ID NO: 4005 - DNA, 639 bp, synthetic construct
  misc_feature 1..639: note = Variant of 3'O-kinase
  source 1..639: mol_type = other DNA
atggcgtttaccattggtttaacaggagggatcgcagcgggcaaatcgactgtgagtgccatgatgcgtgaactgggtctgccggtcatcgatgctgacgaggcagcacgcgccgttatgcgtccaggcgaagaagcttatcgccagattgtagctgcgttcggtccgggcattcttcgtgccgatggcgagatcgatcgccagaaactgggtgctatccgcttttcggacgaacaacaacgtaaggtgctgaatgcgattgtaggtcctgcagtcctgaagaagatgctcgctgagaaagaagctcatatccgctcaggcgccaagacggttgtgctggatatcccgctgctgttcgaatccggattgacccattgggtcgacaaagtgctcgtggtgtacgtctttgatgatgttcagttacgccgccttatggcacgtaacgggtttactgaagaagaagctctgaagcgcattcgttcacagtggcccagtgcggagaaagttaaacgtgcagacgctgtcatcgacaataatggcacgattgaagaaacccgccgccagctgctggccattttacaccagtgggatctgctgggtaagggtggctccggccaccatcatcaccatcactaatga

SEQ ID NO: 4006 - protein, 211 aa, synthetic construct
  REGION 1..211: note = Variant of 3'O-kinase
MAFTIGLTGGIAAGKSTVSAMMRELGLPVIDADEAARAVMRPGEEAYRQIVAAFGPGILRADGEIDRQKLGAIRFSDEQQRKVLNAIVGPAVLKKMLAEKEAHIRSGAKTVVLDIPLLFESGLTHWVDKVLVVYVFDDVQLRRLMARNGFTEEEALKRIRSQWPSAEKVKRADAVIDNNGTIEETRRQLLAILHQWDLLGKGGSGHHHHHH

SEQ ID NO: 4007 - DNA, 639 bp, synthetic construct
  misc_feature 1..639: note = Variant of 3'O-kinase
  source 1..639: mol_type = other DNA
atggcgtttaccattggtttaacaggagggatcgcagcgggcaaatcgactgtgagtgccatgatgcgtgaactgggtctgccggtcatcgatgctgacgaggcagcacgcgccgttatgcgtccaggcgaagaagcttatcgccagattgtagctgcgttcggtccgggcattcttcgtgccgatggcgagatcgatcgccagaaactgggtgctatccgcttttcggacgaacaacaacgtaaggtgctgaatgcgattgtaggtcctgcagtcctgaagaagatgctcgctgagaaagaagctcatatccgctcaggcgccaagacggttgtgctggatatcccgctgctgttcgaatccggattgacccattgggtcgacaaagtgctcgtggtgtacgtcgatgatgatgttcagttacgccgccttatggcacgtaacgggtttactgaagaagaagctctgaagcgcattcgttcacagtggcccagtgcggagaaagttaaacgtgcagacgctgtcatcgacaataatggcacgattgaagaaacccgccgccagctgctggccattttacaccagtgggatctgacgggtaagggtggctccggccaccatcatcaccatcactaatga

SEQ ID NO: 4008 - protein, 211 aa, synthetic construct
  REGION 1..211: note = Variant of 3'O-kinase
MAFTIGLTGGIAAGKSTVSAMMRELGLPVIDADEAARAVMRPGEEAYRQIVAAFGPGILRADGEIDRQKLGAIRFSDEQQRKVLNAIVGPAVLKKMLAEKEAHIRSGAKTVVLDIPLLFESGLTHWVDKVLVVYVDDDVQLRRLMARNGFTEEEALKRIRSQWPSAEKVKRADAVIDNNGTIEETRRQLLAILHQWDLTGKGGSGHHHHHH

SEQ ID NO: 4009 - DNA, 639 bp, synthetic construct
  misc_feature 1..639: note = Variant of 3'O-kinase
  source 1..639: mol_type = other DNA
atggcgtttaccatttgtttaacaggagggatcgcagcgggcaaatcgactgtgagtgccatgatgcgtgaactgggtctgccggtcatcgatgctgacgaggcagcacgcgccgttatgcgtccaggcgaagaagcttatcgccagattgtagctgcgttcggtccgggcattcttcgtgccgatggcgagatcgatcgccagaaactgggtgctatccgcttttcggacgaacaacaacgtaaggtgctgaatgcgattgtaggtcctgcagtcctgaagaagatgctcgctgagaaagaagctcatatccgctcaggcgccaagacggttgtgctggatatcccgctgctgttcgaatccggattgacccattgggtcgacaaagtgctcgtggtgtacgtcgatgatgatgttcagttacgccgccttatggcacgtaacgggtttactgaagaagaagctctgaagcgcattcgttcacagtggcccagtgcggagaaagttaaacgtgcagacgctgtcatcgacaataatggcacgattgaagaaacccgccgccagctgctggccattttacaccagtgggatctgctgggtaagggtggctccggccaccatcatcaccatcactaatga

SEQ ID NO: 4010 - protein, 211 aa, synthetic construct
  REGION 1..211: note = Variant of 3'O-kinase
MAFTICLTGGIAAGKSTVSAMMRELGLPVIDADEAARAVMRPGEEAYRQIVAAFGPGILRADGEIDRQKLGAIRFSDEQQRKVLNAIVGPAVLKKMLAEKEAHIRSGAKTVVLDIPLLFESGLTHWVDKVLVVYVDDDVQLRRLMARNGFTEEEALKRIRSQWPSAEKVKRADAVIDNNGTIEETRRQLLAILHQWDLLGKGGSGHHHHHH

SEQ ID NO: 4011 - DNA, 639 bp, synthetic construct
  misc_feature 1..639: note = Variant of 3'O-kinase
  source 1..639: mol_type = other DNA
atggcgtttaccattggtttaacaggagggatcgcagcgggcaaatcgactgtgagtgccatgatgcgtgaactgggtctgccggtcatcgatgctgacgaggcagcacgcgccgttatgcgtccaggcgaagaagcttatcgccagattgtagctgcgttcggtccgggcattcttcgtgccgatggcgagatcgatcgccagaaactgggtgctatccgcttttcggacgaacaacaacgtaaggtgctgaatgcgattgtaggtcctgcagtcctgaagaagatgctcgctgagaaagaagctcatatccgctcaggcgccaagacggttgtgctggatatcccgctgctgttcgaatccggattgacccattgggtcgacaaagtgctcgtggtgtacgtcgatgatgatgttcagttacgccgccttatggcacgtaacaagtttactgaagaagaagctctgaagcgcattcgttcacagtggcccagtgcggagaaagttaaacgtgcagacgctgtcatcgacaataatggcacgattgaagaaacccgccgccagctgctggccattttacaccagtgggatctgctgggtaagggtggctccggccaccatcatcaccatcactaatga

SEQ ID NO: 4012 - protein, 211 aa, synthetic construct
  REGION 1..211: note = Variant of 3'O-kinase
MAFTIGLTGGIAAGKSTVSAMMRELGLPVIDADEAARAVMRPGEEAYRQIVAAFGPGILRADGEIDRQKLGAIRFSDEQQRKVLNAIVGPAVLKKMLAEKEAHIRSGAKTVVLDIPLLFESGLTHWVDKVLVVYVDDDVQLRRLMARNKFTEEEALKRIRSQWPSAEKVKRADAVIDNNGTIEETRRQLLAILHQWDLLGKGGSGHHHHHH

SEQ ID NO: 4013 - DNA, 639 bp, synthetic construct
  misc_feature 1..639: note = Variant of 3'O-kinase
  source 1..639: mol_type = other DNA
atggcgtttaccattggtttaacaggagggatcgcagcgggcaaatcgactgtgagtgccatgatgcgtgaactgggtctgccggtcatcgatgctgacgaggcagcacgcgccgttatgcgtccaggcgaagaagcttatcgccagattgtagctgcgttcggtgagggcattcttcgtgccgatggcgagatcgatcgccagaaactgggtgctatccgcttttcggacgaacaacaacgtaaggtgctgaatgcgattgtaggtcctgcagtcctgaagaagatgctcgctgagaaagaagctcatatccgctcaggcgccaagacggttgtgctggatatcccgctgctgttcgaatccggattgacccattgggtcgacaaagtgctcgtggtgtacgtcgatgatgatgttcagttacgccgccttatggcacgtaacgggtttactgaagaagaagctctgaagcgcattcgttcacagtggcccagtgcggagaaagttaaacgtgcagacgctgtcatcgacaataatggcacgattgaagaaacccgccgccagctgctggccattttacaccagtgggatctgctgggtaagggtggctccggccaccatcatcaccatcactaatga

SEQ ID NO: 4014 - protein, 211 aa, synthetic construct
  REGION 1..211: note = Variant of 3'O-kinase
MAFTIGLTGGIAAGKSTVSAMMRELGLPVIDADEAARAVMRPGEEAYRQIVAAFGEGILRADGEIDRQKLGAIRFSDEQQRKVLNAIVGPAVLKKMLAEKEAHIRSGAKTVVLDIPLLFESGLTHWVDKVLVVYVDDDVQLRRLMARNGFTEEEALKRIRSQWPSAEKVKRADAVIDNNGTIEETRRQLLAILHQWDLLGKGGSGHHHHHH

SEQ ID NO: 4015 - DNA, 639 bp, synthetic construct
  misc_feature 1..639: note = Variant of 3'O-kinase
  source 1..639: mol_type = other DNA
atggcgtttaccattggtttaacaggagggatcgcagcgggcaaatcgactgtgagtgccatgatgcgtgaactgggtctgccggtcatcgatgctgacgaggcagcacgcgccgttatgcgtccaggcgaagaagcttatcgccagattgtagctgcgttcggtccgggcattcttcgtgccgatggcgagatcgatcgccagaaactgggtgctatccgcttttcggacgaacaacaacgtaaggtgctgaatgcgattgtaggtcctgcagtcctgaagaagatgctcgctgagaaagaagctcatatccgctcaggcgccaagacggttgtgctggatatcccgctgctgttcgaatccggattgacccattgggtcgacaaagtgctcgtggtgtacgtcgatgatgatgttcagttacgccgccttatggcacgtaacgggtttactgaagaagaagctctgaagcgcattcgttcacagtggcccagtgcggagaaagttaaacgtgcacatgctgtcatcgacaataatggcacgattgaagaaacccgccgccagctgctggccattttacaccagtgggatctgctgggtaagggtggctccggccaccatcatcaccatcactaatga

SEQ ID NO: 4016 - protein, 211 aa, synthetic construct
  REGION 1..211: note = Variant of 3'O-kinase
MAFTIGLTGGIAAGKSTVSAMMRELGLPVIDADEAARAVMRPGEEAYRQIVAAFGPGILRADGEIDRQKLGAIRFSDEQQRKVLNAIVGPAVLKKMLAEKEAHIRSGAKTVVLDIPLLFESGLTHWVDKVLVVYVDDDVQLRRLMARNGFTEEEALKRIRSQWPSAEKVKRAHAVIDNNGTIEETRRQLLAILHQWDLLGKGGSGHHHHHH

SEQ ID NO: 4017 - DNA, 639 bp, synthetic construct
  misc_feature 1..639: note = Variant of 3'O-kinase
  source 1..639: mol_type = other DNA
atggcgtttaccattggtttaacaggagggatcgcagcgggcaaatcgactgtgagtgccatgatgcgtgaactgggtctgccggtcatcgatgctgacgaggcagcacgcgccgttatgcgtccaggcgaagaagcttatcgccagattgtagctgcgttcggtccgggcattcttcgtgccgatggcgagatcgatcgccagaaactgggtgctatccgcttttcggacgaacaacaacgtaaggtgctgaatgcgattgtaggtcctgcagtcctgaagaagatgctcgctgagaaagaagctcatatccgctcaggcgccaagacggttgtgctggatatcccgctgctgttcgaatccggattgacccattgggtcgacaaagtgctcgtggtgtacgtcgatgatgatgttcagttacgccgccttatggcacgtaacgggtttactgaagaagaagctctgaagcgcattcgttcacagtggcccagtgcggagaaagtttgtcgtgcagacgctgtcatcgacaataatggcacgattgaagaaacccgccgccagctgctggccattttacaccagtgggatctgctgggtaagggtggctccggccaccatcatcaccatcactaatga

SEQ ID NO: 4018 - protein, 211 aa, synthetic construct
  REGION 1..211: note = Variant of 3'O-kinase
MAFTIGLTGGIAAGKSTVSAMMRELGLPVIDADEAARAVMRPGEEAYRQIVAAFGPGILRADGEIDRQKLGAIRFSDEQQRKVLNAIVGPAVLKKMLAEKEAHIRSGAKTVVLDIPLLFESGLTHWVDKVLVVYVDDDVQLRRLMARNGFTEEEALKRIRSQWPSAEKVCRADAVIDNNGTIEETRRQLLAILHQWDLLGKGGSGHHHHHH

SEQ ID NO: 4019 - DNA, 639 bp, synthetic construct
  misc_feature 1..639: note = Variant of 3'O-kinase
  source 1..639: mol_type = other DNA
atggcgtttaccattggtttaacaggagggatcgcagcgggcaaatcgactgtgagtgccatgatgcgtgaactgggtctgccggtcatcgatgctgacgaggcagcacgcgccgttatgcgtccaggcgaagaagcttatcgccagattgtagctgcgttcggtccgggcattcttcgtgccgatggcgagatcgatcgccagaaactgggtgctatccgcttttcggacgaacaacaacgtaaggtgctgaatgcgattgtaggtcctgcagtcctgaagaagatgctcgctgagaaagaagctcatatccgctcaggcgccaagacggttgtgctggatatcccgctgctgttcgaatccggattgacccattgggtcgacaaagtgctcgtggtgtacgtcgatgatgatgttcagttacgccgccttatggcacgtaacgggtttactgaatctgaagctctgaagcgcattcgttcacagtggcccagtgcggagaaagttaaacgtgcagacgctgtcatcgacaataatggcacgattgaagaaacccgccgccagctgctggccattttacaccagtgggatctgctgggtaagggtggctccggccaccatcatcaccatcactaatga

SEQ ID NO: 4020 - protein, 211 aa, synthetic construct
  REGION 1..211: note = Variant of 3'O-kinase
MAFTIGLTGGIAAGKSTVSAMMRELGLPVIDADEAARAVMRPGEEAYRQIVAAFGPGILRADGEIDRQKLGAIRFSDEQQRKVLNAIVGPAVLKKMLAEKEAHIRSGAKTVVLDIPLLFESGLTHWVDKVLVVYVDDDVQLRRLMARNGFTESEALKRIRSQWPSAEKVKRADAVIDNNGTIEETRRQLLAILHQWDLLGKGGSGHHHHHH

SEQ ID NO: 4021 - DNA, 639 bp, synthetic construct
  misc_feature 1..639: note = Variant of 3'O-kinase
  source 1..639: mol_type = other DNA
atggcgtttaccattggtttaacaggagggatcgcagcgggcaaatcgactgtgagtgccatggagcgtgaactgggtctgccggtcatcgatgctgacgaggcagcacgcgccgttatgcgtccaggcgaagaagcttatcgccagattgtagctgcgttcggtccgggcattcttcgtgccgatggcgagatcgatcgccagaaactgggtgctatccgcttttcggacgaacaacaacgtaaggtgctgaatgcgattgtaggtcctgcagtcctgaagaagatgctcgctgagaaagaagctcatatccgctcaggcgccaagacggttgtgctggatatcccgctgctgttcgaatccggattgacccattgggtcgacaaagtgctcgtggtgtacgtcgatgatgatgttcagttacgccgccttatggcacgtaacgggtttactgaagaagaagctctgaagcgcattcgttcacagtggcccagtgcggagaaagttaaacgtgcagacgctgtcatcgacaataatggcacgattgaagaaacccgccgccagctgctggccattttacaccagtgggatctgctgggtaagggtggctccggccaccatcatcaccatcactaatga

SEQ ID NO: 4022 - protein, 211 aa, synthetic construct
  REGION 1..211: note = Variant of 3'O-kinase
MAFTIGLTGGIAAGKSTVSAMERELGLPVIDADEAARAVMRPGEEAYRQIVAAFGPGILRADGEIDRQKLGAIRFSDEQQRKVLNAIVGPAVLKKMLAEKEAHIRSGAKTVVLDIPLLFESGLTHWVDKVLVVYVDDDVQLRRLMARNGFTEEEALKRIRSQWPSAEKVKRADAVIDNNGTIEETRRQLLAILHQWDLLGKGGSGHHHHHH

SEQ ID NO: 4023 - DNA, 639 bp, synthetic construct
  misc_feature 1..639: note = Variant of 3'O-kinase
  source 1..639: mol_type = other DNA
atggcgtttaccattggtttaacaggagggatcgcagcgggcaaatcgactgtgagtgccatgatgcgtgaactgggtctgccggtcatcgatgctgacgaggcagcacgcgccgttatgcgtccaggcccggaagcttatcgccagattgtagctgcgttcggtccgggcattcttcgtgccgatggcgagatcgatcgccagaaactgggtgctatccgcttttcggacgaacaacaacgtaaggtgctgaatgcgattgtaggtcctgcagtcctgaagaagatgctcgctgagaaagaagctcatatccgctcaggcgccaagacggttgtgctggatatcccgctgctgttcgaatccggattgacccattgggtcgacaaagtgctcgtggtgtacgtcgatgatgatgttcagttacgccgccttatggcacgtaacgggtttactgaagaagaagctctgaagcgcattcgttcacagtggcccagtgcggagaaagttaaacgtgcagacgctgtcatcgacaataatggcacgattgaagaaacccgccgccagctgctggccattttacaccagtgggatctgctgggtaagggtggctccggccaccatcatcaccatcactaatga

SEQ ID NO: 4024 - protein, 211 aa, synthetic construct
  REGION 1..211: note = Variant of 3'O-kinase
MAFTIGLTGGIAAGKSTVSAMMRELGLPVIDADEAARAVMRPGPEAYRQIVAAFGPGILRADGEIDRQKLGAIRFSDEQQRKVLNAIVGPAVLKKMLAEKEAHIRSGAKTVVLDIPLLFESGLTHWVDKVLVVYVDDDVQLRRLMARNGFTEEEALKRIRSQWPSAEKVKRADAVIDNNGTIEETRRQLLAILHQWDLLGKGGSGHHHHHH

SEQ ID NO: 4025 - DNA, 639 bp, synthetic construct
  misc_feature 1..639: note = Variant of 3'O-kinase
  source 1..639: mol_type = other DNA
atggcgtttaccattggtttaacaggagggatcgcagcgggcaaatcgactgtgagtgccatgatgcgtgaactgggtctgccggtcatcgatgctgacgaggcagcacgcgccgttatgcgtccaggcgaagaagcttatcgccagattgtagctgcgttcggtccgggcattcttcgtgccgatggcgagatcgatcgccagaaactgggtgctatccgcttttcggacgaacaacaacgtaaggtgctgaatgcgattgtaggtcctgcagtcctgaagaagatgctcgctgagaaagaagctcatatccgctcaggcgccaagacggttgtgctggatatcccgctgctgttcgaatccggattgacccattgggtcgacaaagtgctcgtggtgtacgtcgatgatgatgttcagttacgccgccttatggcacgtaacgggtttactgaagaagaagctctgaagcgcattcgttcacagtggcccagtgcggagaaagttaaacgtgcagtggctgtcatcgacaataatggcacgattgaagaaacccgccgccagctgctggccattttacaccagtgggatctgctgggtaagggtggctccggccaccatcatcaccatcactaatga

SEQ ID NO: 4026 - protein, 211 aa, synthetic construct
  REGION 1..211: note = Variant of 3'O-kinase
MAFTIGLTGGIAAGKSTVSAMMRELGLPVIDADEAARAVMRPGEEAYRQIVAAFGPGILRADGEIDRQKLGAIRFSDEQQRKVLNAIVGPAVLKKMLAEKEAHIRSGAKTVVLDIPLLFESGLTHWVDKVLVVYVDDDVQLRRLMARNGFTEEEALKRIRSQWPSAEKVKRAVAVIDNNGTIEETRRQLLAILHQWDLLGKGGSGHHHHHH

SEQ ID NO: 4027 - DNA, 639 bp, synthetic construct
  misc_feature 1..639: note = Variant of 3'O-kinase
  source 1..639: mol_type = other DNA
atggcgtttaccattggtttaacaggagggatcgcagcgggcaaatcgactgtgagtgccatgatgcgtgaactgggtctgccggtcatcgatgctgacgaggcagcacgcgccgttatgcgtccaggcgaagaagcttatcgccagattgtagctgcgttcggtccgggcattcttcgtgccgatggcgagatcgatcgccagaaactgggtgctatccgcttttcggacgaacaacaacgtaaggtgctgaatgcgattgtaggtcctgcagtcctgaagaagatgctcgctgagaaagaagctcatatccgctcaggcgcccggacggttgtgctggatatcccgctgctgttcgaatccggattgacccattgggtcgacaaagtgctcgtggtgtacgtcgatgatgatgttcagttacgccgccttatggcacgtaacgggtttactgaagaagaagctctgaagcgcattcgttcacagtggcccagtgcggagaaagttaaacgtgcagacgctgtcatcgacaataatggcacgattgaagaaacccgccgccagctgctggccattttacaccagtgggatctgctgggtaagggtggctccggccaccatcatcaccatcactaatga

SEQ ID NO: 4028 - protein, 211 aa, synthetic construct
  REGION 1..211: note = Variant of 3'O-kinase
MAFTIGLTGGIAAGKSTVSAMMRELGLPVIDADEAARAVMRPGEEAYRQIVAAFGPGILRADGEIDRQKLGAIRFSDEQQRKVLNAIVGPAVLKKMLAEKEAHIRSGARTVVLDIPLLFESGLTHWVDKVLVVYVDDDVQLRRLMARNGFTEEEALKRIRSQWPSAEKVKRADAVIDNNGTIEETRRQLLAILHQWDLLGKGGSGHHHHHH

SEQ ID NO: 4029 - DNA, 639 bp, synthetic construct
  misc_feature 1..639: note = Variant of 3'O-kinase
  source 1..639: mol_type = other DNA
atggcgtttaccattggtttaacaggagggatcgcagcgggcaaatcgactgtgagtgccatgatgcgtgaactgggtctgccggtcatcgatgctgacgaggcagcacgcgccgttatgcgtccaggcgaagaagcttatcgccagattgtagctgcgttcggtccgggcattcttcgtgccgatattgagatcgatcgccagaaactgggtgctatccgcttttcggacgaacaacaacgtaaggtgctgaatgcgattgtaggtcctgcagtcctgaagaagatgctcgctgagaaagaagctcatatccgctcaggcgccaagacggttgtgctggatatcccgctgctgttcgaatccggattgacccattgggtcgacaaagtgctcgtggtgtacgtcgatgatgatgttcagttacgccgccttatggcacgtaacgggtttactgaagaagaagctctgaagcgcattcgttcacagtggcccagtgcggagaaagttaaacgtgcagacgctgtcatcgacaataatggcacgattgaagaaacccgccgccagctgctggccattttacaccagtgggatctgctgggtaagggtggctccggccaccatcatcaccatcactaatga

SEQ ID NO: 4030 - protein, 211 aa, synthetic construct
  REGION 1..211: note = Variant of 3'O-kinase
MAFTIGLTGGIAAGKSTVSAMMRELGLPVIDADEAARAVMRPGEEAYRQIVAAFGPGILRADIEIDRQKLGAIRFSDEQQRKVLNAIVGPAVLKKMLAEKEAHIRSGAKTVVLDIPLLFESGLTHWVDKVLVVYVDDDVQLRRLMARNGFTEEEALKRIRSQWPSAEKVKRADAVIDNNGTIEETRRQLLAILHQWDLLGKGGSGHHHHHH

SEQ ID NO: 4031 - DNA, 639 bp, synthetic construct
  misc_feature 1..639: note = Variant of 3'O-kinase
  source 1..639: mol_type = other DNA
atggcgtttaccattggtttaacaggagggatcgcagcgggcaaatcgactgtgagtgccatgatgcgtgaactgggtctgccggtcatcgatgctgacgaggcagcacgcgccgttatgaagccaggcgaagaagcgtatcgccagattgtagctgcgttcggtccgggcattcttcgtgccgatggcgagatcgatcgccagaaactgggtgctatccgcttttcggacgaacaacaacgcaaggtgctgaatgcgattgtaggtcctgcagtcctgaagaagatgctcgctgagaaagaagctcatatccgctcaggcgccaagacggttgtgctggatatcccgctgctgttcgaatccggattgacccatctggtcgacaaagtgctcgtggtgtacgatgatgatgatgttcagttaaagcgccttatggcacgtaacgggtttactgaagaagaagctctgaagcgcattcgttcacagtggcccagtgcggagaaagttaaacgtgcagacgctgtcatcgacaataatggcaatattgaagaaacccgccgccagctgctggacattttacaccagtgggatctgctgggtaagggtggctccggccaccatcatcaccatcactaatga

SEQ ID NO: 4032 - protein, 211 aa, synthetic construct
  REGION 1..211: note = Variant of 3'O-kinase
MAFTIGLTGGIAAGKSTVSAMMRELGLPVIDADEAARAVMKPGEEAYRQIVAAFGPGILRADGEIDRQKLGAIRFSDEQQRKVLNAIVGPAVLKKMLAEKEAHIRSGAKTVVLDIPLLFESGLTHLVDKVLVVYDDDDVQLKRLMARNGFTEEEALKRIRSQWPSAEKVKRADAVIDNNGNIEETRRQLLDILHQWDLLGKGGSGHHHHHH

SEQ ID NO: 4033 - DNA, 639 bp, synthetic construct
  misc_feature 1..639: note = Variant of 3'O-kinase
  source 1..639: mol_type = other DNA
atggcggttaccattggtttaacaggagggatcgcagcgggcaaatcgactgtgagtgccatgatgcgtgaactgggtctgccggtcatcgatgctgacgaggcagcacgcgccgttatgaagccaggcgaagaagcgtatcgcgacattgtagctgcgttcggtccgggcattcttcgtgaggatggcgagatcgatcgccagaaactgggtgctatccgcttttcggacgaacaacaacgcaaggtgctgaattcgattgtaggtcctgcagtcctgaagaagatgctcgctgagaaagaagctcatatccgctcaggcgccaagacggttgtgctggatatcccgctgctgttcgaatccggattgcaacagtgggtcgacaaagtgctcgtggtgtacgtcgatgatgatgttcagttacgccgccttatggcacgtaacgggtttactgaagaagaagctctgaagcgcattcgttcacagtggcccagtgcggagaaagttaaaatggcagacgctgtcatcgacaataatggcaatattgaagaaacccgccgccagctgctggacattttacaccagtgggatctgctggacaagggtggctccggccaccatcatcaccatcactaatga

SEQ ID NO: 4034 - protein, 211 aa, synthetic construct
  REGION 1..211: note = Variant of 3'O-kinase
MAVTIGLTGGIAAGKSTVSAMMRELGLPVIDADEAARAVMKPGEEAYRDIVAAFGPGILREDGEIDRQKLGAIRFSDEQQRKVLNSIVGPAVLKKMLAEKEAHIRSGAKTVVLDIPLLFESGLQQWVDKVLVVYVDDDVQLRRLMARNGFTEEEALKRIRSQWPSAEKVKMADAVIDNNGNIEETRRQLLDILHQWDLLDKGGSGHHHHHH

SEQ ID NO: 4035 - DNA, 639 bp, synthetic construct
  misc_feature 1..639: note = Variant of 3'O-kinase
  source 1..639: mol_type = other DNA
atggcgtttaccattggtttaacaggagggatcgcagcgggcaaatcgactgtgagtgccatgatgcgtgaactgggtctgccggtcatcgatgctgacgaggcagcacgcgccgttatgaagccaggcgaagaagcgtatcgccaggttgtagctgcgttcggtccgggcattcttcgtgccgatggcgagatcgatcgccagaaactgggtgctatccgcttttcggacgaacaacaacgtaaggtgctgaattcgattgtaggtcctgaggtcctgaagaagatgctcgctgagaaagaagctcatatccgctcaggcgccaagacggtcgtgctggatatcccgctgctgttcgaatccggattgacccatgtggtcgacaaagtgctcgtggtgtacgatgatgatgatgttcagttacgccgccttatggcacgtaacgggtttactgaagaagaagctctgaagcgcattcgttcacagtggcccagtgcggagaaagttaaacgtgcagacgctgtgatcgacaataatggcaatattgaagaaacccgccgccagctgctggacattttacaccagtgggatctgctgggtaagggtggctccggccaccatcatcaccatcactaatga

SEQ ID NO: 4036 - protein, 211 aa, synthetic construct
  REGION 1..211: note = Variant of 3'O-kinase
MAFTIGLTGGIAAGKSTVSAMMRELGLPVIDADEAARAVMKPGEEAYRQVVAAFGPGILRADGEIDRQKLGAIRFSDEQQRKVLNSIVGPEVLKKMLAEKEAHIRSGAKTVVLDIPLLFESGLTHVVDKVLVVYDDDDVQLRRLMARNGFTEEEALKRIRSQWPSAEKVKRADAVIDNNGNIEETRRQLLDILHQWDLLGKGGSGHHHHHH

SEQ ID NO: 4037 - DNA, 639 bp, synthetic construct
  misc_feature 1..639: note = Variant of 3'O-kinase
  source 1..639: mol_type = other DNA
atggcggttaccattggtttaacaggagggatcgcagcgggcaaatcgactgtgagtgccatgatgcgtgaactgggtctgccggtcatcgatgctgacgaggcagcacgcgccgttatgaagccaggcgaagaagcgtatcgcgacattgtagctgcgttcggtccgggcattcttcgtgaggatggcgagatcgatcgccagaaactgggtgctatccgcttttcggacgaacaacaactgaaggtgctgaattcgattgtaggtcctgcagtcctgaagaagatgctcgctgagaaagaagctcatatccgctcaggcgccaagacggttgtgctggatatcccgctgctgttcgaatccggattgcaacagtgggtcgacaaagtgctcgtggtgtacgtcgatgatgatgttcagttacgccgccttatggcacgtaacgggtttactgaagaagaagctctgaagcgcattcgttcacagtggcccagtgcggagaaagttaaacgcgcagacgctgtcatcgacaataatggcaatattgaagaaacccgccgccagctgctggacattttacaccagtgggatctgctggacaagggtggctccggccaccatcatcaccatcactaatga

SEQ ID NO: 4038 - protein, 211 aa, synthetic construct
  REGION 1..211: note = Variant of 3'O-kinase
MAVTIGLTGGIAAGKSTVSAMMRELGLPVIDADEAARAVMKPGEEAYRDIVAAFGPGILREDGEIDRQKLGAIRFSDEQQLKVLNSIVGPAVLKKMLAEKEAHIRSGAKTVVLDIPLLFESGLQQWVDKVLVVYVDDDVQLRRLMARNGFTEEEALKRIRSQWPSAEKVKRADAVIDNNGNIEETRRQLLDILHQWDLLDKGGSGHHHHHH

SEQ ID NO: 4039 - DNA, 639 bp, synthetic construct
  misc_feature 1..639: note = Variant of 3'O-kinase
  source 1..639: mol_type = other DNA
atggcggttaccattggtttaacaggagggatcgcagcgggcaaatcgactgtgagtgccatgatgcgtgaactgggtctgccggtcatcgatgctgacgaggcagcacgcgccgttatgaagccaggcgaagaagcgtatcgcgacattgtagctgcgttcggtccgggcattcttcgtgaggatggcgagatcgatcgccagaaactgggtgctatccgcttttcggacgaacaacaactgaaggtgctgaattcgattgtaggtcctgcagtcctgaagaagatgctcgctgagaaagaagctcatatccgttcaggcgccaagacggttgtgctggatatcccgctgctgttcgaatccggattgcaatcgtgggtcgacaaagtgctcgtggtgtacgtcgatgatgatgttcagttacgccgccttatggcacgtaacgggtttactgaagaagaagctctgaagcgcattcgttcacagtggcccagtgcggagaaagttaaacgtgcagacgctgtcatcgacaataatggcaatattgaagaaacccgccgccagctgctggacattttacaccagtgggatctgctggacaagggtggctccggccaccatcatcaccatcactaatga

SEQ ID NO: 4040 - protein, 211 aa, synthetic construct
  REGION 1..211: note = Variant of 3'O-kinase
MAVTIGLTGGIAAGKSTVSAMMRELGLPVIDADEAARAVMKPGEEAYRDIVAAFGPGILREDGEIDRQKLGAIRFSDEQQLKVLNSIVGPAVLKKMLAEKEAHIRSGAKTVVLDIPLLFESGLQSWVDKVLVVYVDDDVQLRRLMARNGFTEEEALKRIRSQWPSAEKVKRADAVIDNNGNIEETRRQLLDILHQWDLLDKGGSGHHHHHH

SEQ ID NO: 4041 - DNA, 639 bp, synthetic construct
  misc_feature 1..639: note = Variant of 3'O-kinase
  source 1..639: mol_type = other DNA
atggcgtttaccattggtttaacaggagggatcgcagcgggcaaatcgactgtgagtgccatgatgcgtgaactgggtctgccggtcatcgatgctgacgaggcagcacgcgccgttatgaagccaggcgaagaagcgtatcgccagattgtagctgcgttcggtccgggcattcttcgtgccgatggcgagatcgatcgccagaaactgggtcagatccgcttttcggacgaacaacaacgcaaggtgctgaatgcgattgtaggtcctgaggtcctgaagaagatgaacgctgagaaagaagctcatatccgctcaggcgccaagacggttgtgctggatatcccgctgctgttcgaatccggattgacccattgggtcgacaaagtgctcgtggtgtacgatgatgatgatgttcagttacgccgccttatggcacgtaacgggtttactgaagaagaagctctgaagcgcattcgttcacagtggcccagtgcggagaaagttaaacgtgcagacgctgtcatcgacaataatggcaatattgaagaaacccgccgccagctgctggacattttacaccagtgggatctgctgggtaagggtggctccggccaccatcatcaccatcactaatga

SEQ ID NO: 4042 - protein, 211 aa, synthetic construct
  REGION 1..211: note = Variant of 3'O-kinase
MAFTIGLTGGIAAGKSTVSAMMRELGLPVIDADEAARAVMKPGEEAYRQIVAAFGPGILRADGEIDRQKLGQIRFSDEQQRKVLNAIVGPEVLKKMNAEKEAHIRSGAKTVVLDIPLLFESGLTHWVDKVLVVYDDDDVQLRRLMARNGFTEEEALKRIRSQWPSAEKVKRADAVIDNNGNIEETRRQLLDILHQWDLLGKGGSGHHHHHH

SEQ ID NO: 4043 - DNA, 639 bp, synthetic construct
  misc_feature 1..639: note = Variant of 3'O-kinase
  source 1..639: mol_type = other DNA
atggcgtttaccattggtttaacaggagggatcgcagcgggcaaatcgactgtgagtgccatgatgcgtgaactgggtctgccggtcatcgatgctgacgaggcagcacgcgccgttatgaagccaggcgaagaagcgtatcgccagattgtagctgcgttcggtccgggcattcttcgtgaggatggcgagatcgatcgccagaaactgggtgctatccgcttttcggacgaacaacaacgtaaggtgctgaattcgattgtaggtcctgcagtcctgaagaagatgctcgctgagaaagaagctcatatccgttcaggcgccaagacggttgtgctggatatcccgctgctgttcgaatccggattgagttcgtgggtcgacaaagtgctcgtggtgtacgtcgatgatgatgttcagttacgccgccttatggcacgtaacgggtttactgaagaagaagctctgaagcgcattcgttcacagtggcccagtgaggagaaagttaaaatggcagacgctgtcatcgacaataatggcaatattgaagaaacccgccgccagctgctggacattttacaccagtgggatctgctggacaagggtggctccggccaccatcatcaccatcactaatga

SEQ ID NO: 4044 - protein, 211 aa, synthetic construct
  REGION 1..211: note = Variant of 3'O-kinase
MAFTIGLTGGIAAGKSTVSAMMRELGLPVIDADEAARAVMKPGEEAYRQIVAAFGPGILREDGEIDRQKLGAIRFSDEQQRKVLNSIVGPAVLKKMLAEKEAHIRSGAKTVVLDIPLLFESGLSSWVDKVLVVYVDDDVQLRRLMARNGFTEEEALKRIRSQWPSEEKVKMADAVIDNNGNIEETRRQLLDILHQWDLLDKGGSGHHHHHH

SEQ ID NO: 4045 - DNA, 639 bp, synthetic construct
  misc_feature 1..639: note = Variant of 3'O-kinase
  source 1..639: mol_type = other DNA
atggcggttaccattggtttaacaggagggatcgcagcgggcaaatcgactgtgagtgccatgatgcgtgaactgggtctgccggtcatcgatgctgacgaggcagcacgcgccgttatgaagccaggcgaagaagcgtatcgcgacattgtagctgcgttcggtccgggcattcttcgtgcggatggcgagatcgatcgccagaaactgggtgctatccgcttttcggacgaacaacaacgtaaggtgctgaattcgattgtaggtcctgcagtcctgaagaagatgctcgctgagaaagaagctcatatcaagtcaggcgccaagacggttgtgctggatatcccgctgctgttcgaatccggattgcaatcgtgggtcgacaaagttctcgtggtgtacgtcgatgatgatgttcagttacgccgccttatggcacgtaacgggtttactgaagaagaagctctgaagcgcattcgttcacagtggcccagtgcggagaaagttaaacgtgcagacgctgtcatcgacaataatggcaatattgaagaaacccgccgccagctgctggacattttacaccagtgggatctgctggacaagggtggctccggccaccatcatcaccatcactaatga

SEQ ID NO: 4046 - protein, 211 aa, synthetic construct
  REGION 1..211: note = Variant of 3'O-kinase
MAVTIGLTGGIAAGKSTVSAMMRELGLPVIDADEAARAVMKPGEEAYRDIVAAFGPGILRADGEIDRQKLGAIRFSDEQQRKVLNSIVGPAVLKKMLAEKEAHIKSGAKTVVLDIPLLFESGLQSWVDKVLVVYVDDDVQLRRLMARNGFTEEEALKRIRSQWPSAEKVKRADAVIDNNGNIEETRRQLLDILHQWDLLDKGGSGHHHHHH

SEQ ID NO: 4047 - DNA, 639 bp, synthetic construct
  misc_feature 1..639: note = Variant of 3'O-kinase
  source 1..639: mol_type = other DNA
atggcggttaccattggtttaacaggagggatcgcagcgggcaaatcgactgtgagtgccatgatgcgtgaactgggtctgccggtcatcgatgctgacgaggcagcacgcgccgttatgaagccaggcgaagaagcgtatcgcgacattgtagctgcgttcggtccgggcattcttcgtgcggatggcgagatcgatcgccagaaactgggtgctatccgcttttcggacgaacaacaacgtaaggtgctgaattcgattgtaggtcctgcagtcctgaagaagatgctcgctgagaaagaagctcatatccgctcaggcgccaagacggttgtgctggatatcccgctgctgttcgaatccggattgcaacagtgggtcgacaaagtgctcgtggtgtacgtcgatgatgatgttcagttacgccgccttatggcacgtaacgggtttactgaagaagaagctctgaagcgcattcgttcacagtggcccagtattgagaaagttaaaatggcagacgctgtcatcgacaataatggcaatattgaagaaacccgccgccagctgctggacattttacaccagtgggatctgctggacaagggtggctccggccaccatcatcaccatcactaatga

SEQ ID NO: 4048 - protein, 211 aa, synthetic construct
  REGION 1..211: note = Variant of 3'O-kinase
MAVTIGLTGGIAAGKSTVSAMMRELGLPVIDADEAARAVMKPGEEAYRDIVAAFGPGILRADGEIDRQKLGAIRFSDEQQRKVLNSIVGPAVLKKMLAEKEAHIRSGAKTVVLDIPLLFESGLQQWVDKVLVVYVDDDVQLRRLMARNGFTEEEALKRIRSQWPSIEKVKMADAVIDNNGNIEETRRQLLDILHQWDLLDKGGSGHHHHHH

SEQ ID NO: 4049 - DNA, 639 bp, synthetic construct
  misc_feature 1..639: note = Variant of 3'O-kinase
  source 1..639: mol_type = other DNA
atggcggttaccattggtttaacaggagggatcgcagcgggcaaatcgactgtgagtgccatgatgcgtgaactgggtctgccggtcatcgatgctgacgaggcagcacgcgccgttatgaagccaggcgaagaagcgtatcgccaaattgtagctgcgttcggtccgggcattcttcgtgaggatggcgagatcgatcgccagaaactgggtgctatccgcttttcggacgaacaacaactgaaggtgctgaattcgattgtaggtcctgcagtcctgaagaagatgctcgctgagaaagaagctcatatccgctcaggcgccaagacggttgtgctggatatcccgctgctgttcgaatccggattgacttcgtgggtcgacaaagtgctcgtggtgtacgtcgatgatgatgttcagttacgccgccttatggcacgtaacgggtttactgaagaagaagctctgaagcgcattcgttcacagtggcccagtattgagaaagttaaaatggcagacgctgtcatcgacaataatggcaatattgaagaaacccgccgccagctgctggacattttacaccagtgggatctgctggacaagggtggctccggccaccatcatcaccatcactaatga

SEQ ID NO: 4050 - protein, 211 aa, synthetic construct
  REGION 1..211: note = Variant of 3'O-kinase
MAVTIGLTGGIAAGKSTVSAMMRELGLPVIDADEAARAVMKPGEEAYRQIVAAFGPGILREDGEIDRQKLGAIRFSDEQQLKVLNSIVGPAVLKKMLAEKEAHIRSGAKTVVLDIPLLFESGLTSWVDKVLVVYVDDDVQLRRLMARNGFTEEEALKRIRSQWPSIEKVKMADAVIDNNGNIEETRRQLLDILHQWDLLDKGGSGHHHHHH

SEQ ID NO: 4051 - DNA, 639 bp, synthetic construct
  misc_feature 1..639: note = Variant of 3'O-kinase
  source 1..639: mol_type = other DNA
atggcggttaccattggtttaacaggagggatcgcagcgggcaaatcgactgtgagtgccatgatgcgtgaactgggtctgccggtcatcgatgctgacgaggcagcacgcgccgttatgaagccaggcgaagaagcgtatcgccaaattgtagctgcgttcggtccgggcattcttcgtgaggatggcgagatcgatcgccagaaactgggtgctatccgcttttcggacgaacaacaactgaaggtgctgaattcgattgtaggtcctgcagtcctgaagaagatgctcgctgagaaagaagctcatatcaagtcaggcgccaagacggttgtgctggatatcccgctgctgttcgaatccggattgcaatcgtgggtcgacaaagtgctcgtggtgtacgtcgatgatgatgttcagttacgccgccttatggcacgtaacgggtttactgaagaagaagctctgaagcgcattcgttcacagtggcccagtattgagaaagttaaaatggcagacgctgtcatcgacaataatggcaatattgaagaaacccgccgccagctgctggacattttacaccagtgggatctgctgggcaagggtggctccggccaccatcatcaccatcactaatga

SEQ ID NO: 4052 - protein, 211 aa, synthetic construct
  REGION 1..211: note = Variant of 3'O-kinase
MAVTIGLTGGIAAGKSTVSAMMRELGLPVIDADEAARAVMKPGEEAYRQIVAAFGPGILREDGEIDRQKLGAIRFSDEQQLKVLNSIVGPAVLKKMLAEKEAHIKSGAKTVVLDIPLLFESGLQSWVDKVLVVYVDDDVQLRRLMARNGFTEEEALKRIRSQWPSIEKVKMADAVIDNNGNIEETRRQLLDILHQWDLLGKGGSGHHHHHH

SEQ ID NO: 4053 - DNA, 639 bp, synthetic construct
  misc_feature 1..639: note = Variant of 3'O-kinase
  source 1..639: mol_type = other DNA
atggcgtttaccattggtttaacaggagggatcgcagcgggcaaatcgactgtgagtgccatgatgcgtgaactgggtctgccggtcatcgatgctgacgaggcagcacgcgccgttatgaagccaggcgaagaagcgtatcgccaaattgtagctgcgttcggtccgggcattcttcgtgaggatggcgagatcgatcgccagaaactgggtgctatccgcttttcggacgaacaacaacgcaagatgctgaattcgattgtaggtcctgcagtcctgaagaagatgctcgctgagaaagaagctcatatccgctcaggcgccaagacggttgtgctggatatcccgctgctgttcgaatccggattgcaatcgtgggtcgacaaagtgctcgtggtgtacgtcgatgatgatgttcagttacgccgccttatggcacgtaacgggtttactgaagaagaagctctgaagcgcattcgttcacagtggcccagtgcggagaaagttaaacgcgcagacgctgtcatcgacaataatggcaatattgaagaaacccgccgccagctgctggacattttacaccagtgggatctgctggacaagggtggctccggccaccatcatcaccatcactaatga

SEQ ID NO: 4054 - protein, 211 aa, synthetic construct
  REGION 1..211: note = Variant of 3'O-kinase
MAFTIGLTGGIAAGKSTVSAMMRELGLPVIDADEAARAVMKPGEEAYRQIVAAFGPGILREDGEIDRQKLGAIRFSDEQQRKMLNSIVGPAVLKKMLAEKEAHIRSGAKTVVLDIPLLFESGLQSWVDKVLVVYVDDDVQLRRLMARNGFTEEEALKRIRSQWPSAEKVKRADAVIDNNGNIEETRRQLLDILHQWDLLDKGGSGHHHHHH

SEQ ID NO: 4055 - DNA, 639 bp, synthetic construct
  misc_feature 1..639: note = Variant of 3'O-kinase
  source 1..639: mol_type = other DNA
atggcgtttaccattggtttaacaggagggatcgcagcgggcaaatcgactgtgagtgccatgatgcgtgaactgggtctgccggtcatcgatgctgacgaggcagcacgcgccgttatgaagccaggcgaagaagcgtatcgccaaattgtagctgcgttcggtccgggcattcttcgtgaggatggcgagatcgatcgccagaaactgggtgctatccgcttttcggacgaacaacaactgaaggtgctgaattcgattgtaggtcctgcagtcctgaagaagatgctcgctgagaaagaagctcatatccgttcaggcgccaagacggttgtgctggatatcccgctgctgttcgaatccggattgacttcgtgggtcgacaaagtgctcgtggtgtacgtcgatgatgatgttcagttacgccgccttatggcacgtaacgggtttactgaagaagaagctctgaagcgcattcgttcacagtggcccagtgaggagaaagttaaaatggcagacgctgtcatcgacaataatggcaatattgaagaaacccgccgccagctgctggacattttacaccagtgggatctgctggacaagggtggctccggccaccatcatcaccatcactaatga

SEQ ID NO: 4056 - protein, 211 aa, synthetic construct
  REGION 1..211: note = Variant of 3'O-kinase
MAFTIGLTGGIAAGKSTVSAMMRELGLPVIDADEAARAVMKPGEEAYRQIVAAFGPGILREDGEIDRQKLGAIRFSDEQQLKVLNSIVGPAVLKKMLAEKEAHIRSGAKTVVLDIPLLFESGLTSWVDKVLVVYVDDDVQLRRLMARNGFTEEEALKRIRSQWPSEEKVKMADAVIDNNGNIEETRRQLLDILHQWDLLDKGGSGHHHHHH

SEQ ID NO: 4057 - DNA, 639 bp, synthetic construct
  misc_feature 1..639: note = Variant of 3'O-kinase
  source 1..639: mol_type = other DNA
atggcgtttaccattggtttaacaggagggatcgcagcgggcaaatcgactgtgagtgccatgatgcgtgaactgggtctgccggtcatcgatgctgacgaggcagcacgcgccgttatgaagccaggcgaagaagcgtatcgccagattgtagctgcgttcggtccgggcattcttcgtgccgatggcgagatcgatcgccagaaactgggtgctatccgcttttcggacgaacaacaacgtaaggtgctgaattcgattgtaggtcctgcggtcctggcgaagatgctggctgagaaagaagctcatatccgctcaggcgccaagacggtcgtgctggatatcccgctgctgttcgaatccggattgacccatctggtcgacaaagtgctcgtggtgtacgtcgatgatgatgttcagttacgccgccttatggcacgtaacgggtttactgaagaagaagctctgaagcgcattcgttcacagtggcccagtgcggagaaagttaaacgtgcagacgctgtcatcgacaataatggcaatattgaagaaacccgccgccagctgctggacattttacaccagtgggatctgctgggtaagggtggctccggccaccatcatcaccatcactaatga

SEQ ID NO: 4058 - protein, 211 aa, synthetic construct
  REGION 1..211: note = Variant of 3'O-kinase
MAFTIGLTGGIAAGKSTVSAMMRELGLPVIDADEAARAVMKPGEEAYRQIVAAFGPGILRADGEIDRQKLGAIRFSDEQQRKVLNSIVGPAVLAKMLAEKEAHIRSGAKTVVLDIPLLFESGLTHLVDKVLVVYVDDDVQLRRLMARNGFTEEEALKRIRSQWPSAEKVKRADAVIDNNGNIEETRRQLLDILHQWDLLGKGGSGHHHHHH

SEQ ID NO: 4059 - DNA, 639 bp, synthetic construct
  misc_feature 1..639: note = Variant of 3'O-kinase
  source 1..639: mol_type = other DNA
atggcgtttaccattggtttaacaggagggatcgcagcgggcaaatcgactgtgagtgccatgatgcgtgaactgggtctgccggtcatcgatgctgacgaggcagcacgcgccgttatgaagccaggcgaagaagcgtatcgcgacattgtagctgcgttcggtccgggcattcttcgtgcggatggcgagatcgatcgccagaaactgggtgctatccgcttttcggacgaacaacaacgtaaggtgctgaattcgattgtaggtcctgcagtcctgaagaagatgctcgctgagaaagaagctcatatccgttcaggcgccaagacgattgtgctggatatcccgctgctgttcgaatccggattgcaacactgggtcgacaaagtgctcgtggtgtacgtcgatgatgatgttcagttacgccgccttatggcacgtaacgggtttactgaagaagaagctctgaagcgcattcgttcacagtggcccagtgaggagaaagttaaaatggcagacgctgtcatcgacaataatggcaatattgaagaaacccgccgccagctgctggacattttacaccagtgggatctgctggacaagggtggctccggccaccatcatcaccatcactaatga

SEQ ID NO: 4060 - protein, 211 aa, synthetic construct
  REGION 1..211: note = Variant of 3'O-kinase
MAFTIGLTGGIAAGKSTVSAMMRELGLPVIDADEAARAVMKPGEEAYRDIVAAFGPGILRADGEIDRQKLGAIRFSDEQQRKVLNSIVGPAVLKKMLAEKEAHIRSGAKTIVLDIPLLFESGLQHWVDKVLVVYVDDDVQLRRLMARNGFTEEEALKRIRSQWPSEEKVKMADAVIDNNGNIEETRRQLLDILHQWDLLDKGGSGHHHHHH

SEQ ID NO: 4061 - DNA, 639 bp, synthetic construct
  misc_feature 1..639: note = Variant of 3'O-kinase
  source 1..639: mol_type = other DNA
atggcgtttaccattggtttaacaggagggatcgcagcgggcaaatcgactgtgagtgccatgatgcgtgaactgggtctgccggtcatcgatgctgacgaggcagcacgcgccgttatgaagccaggcgaagaagcgtatcgcgacattgtagctgcgttcggtccgggcattcttcgtgaggatggcgagatcgatcgccagaaactgggtgctatccgcttttcggacgaacaacaacgtaaggtgctgaattcgattgtaggtcctgcagtcctgaagaagatgctcgctgagaaagaagctcatatccgctcaggcgccaagacggttgtgctggatatcccgctgctgttcgaatccggattgcaatcgtgggtcgacaaagtgctcgtggtgtacgtcgatgatgatgttcagttacgccgccttatggcacgtaacgggtttactgaagaagaagctctgaagcgcattcgttcacagtggcccagtattgagaaagttaaaatggcagacgctgtcatcgacaataatggcaatattgaagaaacccgccgccagctgctggacattttacaccagtgggatctgctgggtaagggtggctccggccaccatcatcaccatcactaatga

SEQ ID NO: 4062 - protein, 211 aa, synthetic construct
  REGION 1..211: note = Variant of 3'O-kinase
MAFTIGLTGGIAAGKSTVSAMMRELGLPVIDADEAARAVMKPGEEAYRDIVAAFGPGILREDGEIDRQKLGAIRFSDEQQRKVLNSIVGPAVLKKMLAEKEAHIRSGAKTVVLDIPLLFESGLQSWVDKVLVVYVDDDVQLRRLMARNGFTEEEALKRIRSQWPSIEKVKMADAVIDNNGNIEETRRQLLDILHQWDLLGKGGSGHHHHHH

SEQ ID NO: 4063 - DNA, 639 bp, synthetic construct
  misc_feature 1..639: note = Variant of 3'O-kinase
  source 1..639: mol_type = other DNA
atggcggttaccattggtttaacaggagggatcgcagcgggcaaatcgactgtgagtgccatgatgcgtgaactgggtctgccggtcatcgatgctgacgaggcagcacgcgccgttatgaagccaggcgaagaagcgtatcgcgacattgtagctgcgttcggtccgggcattcttcgtgaggatggcgagatcgatcgccagaaactgggtgctatccgcttttcggacgaacaacaacgcaagatgctgaattcgattgtaggtcctgcagtcctgaagaagatgctcgctgagaaagaagctcatatccgctcaggcgccaagacggttgtgctggatatcccgctgctgttcgaatccggattgacccattgggtcgacaaagtgctcgtggtgtacgtcgatgatgatgttcagttacgccgccttatggcacgtaacgggtttactgaagaagaagctctgaagcgcattcgttcacagtggcccagtgcggagaaagttaaacgtgcagacgctgtcatcgacaataatggcaatattgaagaaacccgccgccagctgctggacattttacaccagtgggatctgctggacaagggtggctccggccaccatcatcaccatcactaatga

SEQ ID NO: 4064 - protein, 211 aa, synthetic construct
  REGION 1..211: note = Variant of 3'O-kinase
MAVTIGLTGGIAAGKSTVSAMMRELGLPVIDADEAARAVMKPGEEAYRDIVAAFGPGILREDGEIDRQKLGAIRFSDEQQRKMLNSIVGPAVLKKMLAEKEAHIRSGAKTVVLDIPLLFESGLTHWVDKVLVVYVDDDVQLRRLMARNGFTEEEALKRIRSQWPSAEKVKRADAVIDNNGNIEETRRQLLDILHQWDLLDKGGSGHHHHHH

SEQ ID NO: 4065 - DNA, 639 bp, synthetic construct
  misc_feature 1..639: note = Variant of 3'O-kinase
  source 1..639: mol_type = other DNA
atggcgtttaccattggtttaacaggagggatcgcagcgggcaaatcgactgtgagtgccatgatgcgtgaactgggtctgccggtcatcgatgctgacgaggcagcacgcgccgttatgaagccaggcgaagaagcgtatcgccagattgtagctgcgttcggtccgggcattcttcgcgccgatggcgagatcgatcgccagaaactgggtgctatccgcttttcggacgaacaacaacgcaaggtgctgaatgcgattgtaggtcctgcggtcctggcgaagatgctggctgagaaagaagctcacatccgctcaggcgccaagacgatcgtgctggatatcccgctgctgttcgaatccggattgacccatctggtcgacaaagtgctcgtggtgtacgttgatgatgatgttcagttaaagcgccttatggcacgtaacgggtttactgaagaagaagctctgaagcgcattcgttcacagtggcccagtgcggagaaagttaaacgtgcagacgctgtcatcgacaataatggcaatattgaagaaacccgccgccagctgctggacattttacaccagtgggatctgctgggtaagggtggctccggccaccatcatcaccatcactaatga

SEQ ID NO: 4066 - protein, 211 aa, synthetic construct
  REGION 1..211: note = Variant of 3'O-kinase
MAFTIGLTGGIAAGKSTVSAMMRELGLPVIDADEAARAVMKPGEEAYRQIVAAFGPGILRADGEIDRQKLGAIRFSDEQQRKVLNAIVGPAVLAKMLAEKEAHIRSGAKTIVLDIPLLFESGLTHLVDKVLVVYVDDDVQLKRLMARNGFTEEEALKRIRSQWPSAEKVKRADAVIDNNGNIEETRRQLLDILHQWDLLGKGGSGHHHHHH

SEQ ID NO: 4067 - DNA, 639 bp, synthetic construct
  misc_feature 1..639: note = Variant of 3'O-kinase
  source 1..639: mol_type = other DNA
atggcgtttaccattggtttaacaggagggatcgcagcgggcaaatcgactgtgagtgccatgatgcgtgaactgggtctgccggtcatcgatgctgacgaggcagcacgcgccgttatgaagccaggcgaagaagcgtatcgccagattgtagctgcgttcggtccgggcattcttcgtgaggatggcgagatcgatcgccagaaactgggtgctatccgcttttcggacgaacaacaacgtaaggtgctgaattcgattgtaggtcctgcagtcctgaagaagatgctcgctgagaaagaagctcatatccgctcaggcgccaagacggttgtgctggatatcccgctgctgttcgaatccggattgacccattgggtcgacaaagtgctcgtggtgtacgtcgatgatgatgttcagttacgccgccttatggcacgtaacgggtttactgaagaagaagctctgaagcgcattcgttcacagtggcccagtgcggagaaagttaaacgcgcagacgctgtcatcgacaataatggcaatattgaagaaacccgccgccagctgctggacattttacaccagtgggatctgctggacaagggtggctccggccaccatcatcaccatcactaatga

SEQ ID NO: 4068 - protein, 211 aa, synthetic construct
  REGION 1..211: note = Variant of 3'O-kinase
MAFTIGLTGGIAAGKSTVSAMMRELGLPVIDADEAARAVMKPGEEAYRQIVAAFGPGILREDGEIDRQKLGAIRFSDEQQRKVLNSIVGPAVLKKMLAEKEAHIRSGAKTVVLDIPLLFESGLTHWVDKVLVVYVDDDVQLRRLMARNGFTEEEALKRIRSQWPSAEKVKRADAVIDNNGNIEETRRQLLDILHQWDLLDKGGSGHHHHHH

SEQ ID NO: 4069 - DNA, 639 bp, synthetic construct
  misc_feature 1..639: note = Variant of 3'O-kinase
  source 1..639: mol_type = other DNA
atggcggttaccattggtttaacaggagggatcgcagcgggcaaatcgactgtgagtgccatgatgcgtgaactgggtctgccggtcatcgatgctgacgaggcagcacgcgccgttatgaagccaggcgaagaagcgtatcgccaaattgtagctgcgttcggtccgggcattcttcgtgcggatggcgagatcgatcgccagaaactgggtgctatccgcttttcggacgaacaacaactgaaggtgctgaattcgattgtaggtcctgcagtcctgaagaagatgctcgctgagaaagaagctcatatccgttcaggcgccaagacggttgtgctggatatcccgctgctgttcgaatccggattgagttcgtgggtcgacaaagtgctcgtggtgtacgtcgatgatgatgttcagttacgccgccttatggcacgtaacgggtttactgaagaagaagctctgaagcgcattcgttcacagtggcccagtgcggagaaagttaaacgcgcagacgctgtcatcgacaataatggcaatattgaagaaacccgccgccagctgctggacattttacaccagtgggatctgctggacaagggtggctccggccaccatcatcaccatcactaatga

SEQ ID NO: 4070 - protein, 211 aa, synthetic construct
  REGION 1..211: note = Variant of 3'O-kinase
MAVTIGLTGGIAAGKSTVSAMMRELGLPVIDADEAARAVMKPGEEAYRQIVAAFGPGILRADGEIDRQKLGAIRFSDEQQLKVLNSIVGPAVLKKMLAEKEAHIRSGAKTVVLDIPLLFESGLSSWVDKVLVVYVDDDVQLRRLMARNGFTEEEALKRIRSQWPSAEKVKRADAVIDNNGNIEETRRQLLDILHQWDLLDKGGSGHHHHHH

SEQ ID NO: 4071 - DNA, 639 bp, synthetic construct
  misc_feature 1..639: note = Variant of 3'O-kinase
  source 1..639: mol_type = other DNA
atggcgtttaccattggtttaacaggagggatcgcagcgggcaaatcgactgtgagtgccatgatgcgtgaactgggtctgccggtcatcgatgctgacgaggcagcacgcgccgttatgaagccaggcgaagaagcgtatcgcgacattgtagctgcgttcggtccgggcattcttcgtgaggatggcgagatcgatcgccagaaactgggtgctatccgcttttcggacgaacaacaacgcaagatgctgaattcgattgtaggtcctgcagtcctgaagaagatgctcgctgagaaagaagctcatatcaagtcaggcgccaagacggttgtgctggatatcccgctgctgttcgaatccggattgagttcgtgggtcgacaaagtgctcgtggtgtacgtcgatgatgatgttcagttacgccgccttatggcacgtaacgggtttactgaagaagaagctctgaagcgcattcgttcacagtggcccagtgcggagaaagttaaaatggcagacgctgtcatcgacaataatggcaatattgaagaaacccgccgccagctgctggacattttacaccagtgggatctgctgggtaagggtggctccggccaccatcatcaccatcactaatga

SEQ ID NO: 4072 - protein, 211 aa, synthetic construct
  REGION 1..211: note = Variant of 3'O-kinase
MAFTIGLTGGIAAGKSTVSAMMRELGLPVIDADEAARAVMKPGEEAYRDIVAAFGPGILREDGEIDRQKLGAIRFSDEQQRKMLNSIVGPAVLKKMLAEKEAHIKSGAKTVVLDIPLLFESGLSSWVDKVLVVYVDDDVQLRRLMARNGFTEEEALKRIRSQWPSAEKVKMADAVIDNNGNIEETRRQLLDILHQWDLLGKGGSGHHHHHH

SEQ ID NO: 4073 - DNA, 639 bp, synthetic construct
  misc_feature 1..639: note = Variant of 3'O-kinase
  source 1..639: mol_type = other DNA
atggcgtttaccattggtttaacaggagggatcgcagcgggcaaatcgactgtgagtgccatgatgcgtgaactgggtctgccggtcatcgatgctgacgaggcagcacgcgccgttatgaagccaggcgaagaagcgtatcgccaaattgtagctgcgttcggtccgggcattcttcgtgaggatggcgagatcgatcgccagaaactgggtgctatccgcttttcggacgaacaacaactgaagatgctgaattcgattgtaggtcctgcagtcctgaagaagatgctcgctgagaaagaagctcatatccgttcaggcgccaagacggttgtgctggatatcccgctgctgttcgaatccggattgactcactgggtcgacaaagtgctcgtggtgtacgtcgatgatgatgttcagttacgccgccttatggcacgtaacgggtttactgaagaagaagctctgaagcgcattcgttcacagtggcccagtattgagaaagttaaaatggcagacgctgtcatcgacaataatggcaatattgaagaaacccgccgccagctgctggacattttacaccagtgggatctgctggacaagggtggctccggccaccatcatcaccatcactaatga

SEQ ID NO: 4074 - protein, 211 aa, synthetic construct
  REGION 1..211: note = Variant of 3'O-kinase
MAFTIGLTGGIAAGKSTVSAMMRELGLPVIDADEAARAVMKPGEEAYRQIVAAFGPGILREDGEIDRQKLGAIRFSDEQQLKMLNSIVGPAVLKKMLAEKEAHIRSGAKTVVLDIPLLFESGLTHWVDKVLVVYVDDDVQLRRLMARNGFTEEEALKRIRSQWPSIEKVKMADAVIDNNGNIEETRRQLLDILHQWDLLDKGGSGHHHHHH

SEQ ID NO: 4075 - DNA, 639 bp, synthetic construct
  misc_feature 1..639: note = Variant of 3'O-kinase
  source 1..639: mol_type = other DNA
atggcggttaccattggtttaacaggagggatcgcagcgggcaaatcgactgtgagtgccatgatgcgtgaactgggtctgccggtcatcgatgctgacgaggcagcacgcgccgttatgaagccaggcgaagaagcgtatcgcgacattgtagctgcgttcggtccgggcattcttcgtgccgatggcgagatcgatcgccagaaactgggtgctatccgcttttcggacgaacaacaactgaaggtgctgaattcgattgtaggtcctgcagtcctgaagaagatgctcgctgagaaagaagctcatatccgctcaggcgccaagacggttgtgctggatatcccgctgctgttcgaatccggattgcaacagtgggtcgacaaagtgctcgtggtgtacgtcgatgatgatgttcagttacgccgccttatggcacgtaacgggtttactgaagaagaagctctgaagcgcattcgttcacagtggcccagtgaggagaaagttaaaatggcagacgctgtcatcgacaataatggcaatattgaagaaacccgccgccagctgctggacattttacaccagtgggatctgctgggtaagggtggctccggccaccatcatcaccatcactaatga

SEQ ID NO: 4076 - protein, 211 aa, synthetic construct
  REGION 1..211: note = Variant of 3'O-kinase
MAVTIGLTGGIAAGKSTVSAMMRELGLPVIDADEAARAVMKPGEEAYRDIVAAFGPGILRADGEIDRQKLGAIRFSDEQQLKVLNSIVGPAVLKKMLAEKEAHIRSGAKTVVLDIPLLFESGLQQWVDKVLVVYVDDDVQLRRLMARNGFTEEEALKRIRSQWPSEEKVKMADAVIDNNGNIEETRRQLLDILHQWDLLGKGGSGHHHHHH

SEQ ID NO: 4077 - DNA, 639 bp, synthetic construct
  misc_feature 1..639: note = Variant of 3'O-kinase
  source 1..639: mol_type = other DNA
atggcggttaccattggtttaacaggagggatcgcagcgggcaaatcgactgtgagtgccatgatgcgtgaactgggtctgccggtcatcgatgctgacgaggcagcacgcgccgttatgaagccaggcgaagaagcgtatcgcgacattgtagctgcgttcggtccgggcattcttcgtgaggatggcgagatcgatcgccagaaactgggtgctatccgcttttcggacgaacaacaacgcaagatgctgaattcgattgtaggtcctgcagtcctgaagaagatgctcgctgagaaagaagctcatatccgttcaggcgccaagacggttgtgctggatatcccgctgctgttcgaatccggattgacttcgtgggtcgacaaagtgctcgtggtgtacgtcgatgatgatgttcagttacgccgccttatggcacgtaacgggtttactgaagaagaagctctgaagcgcattcgttcacagtggcccagtgaggagaaagttaaacgcgcagacgctgtcatcgacaataatggcaatattgaagaaacccgccgccagctgctggacattttacaccagtgggatctgctgggcaagggtggctccggccaccatcatcaccatcactaatga

SEQ ID NO: 4078 - protein, 211 aa, synthetic construct
  REGION 1..211: note = Variant of 3'O-kinase
MAVTIGLTGGIAAGKSTVSAMMRELGLPVIDADEAARAVMKPGEEAYRDIVAAFGPGILREDGEIDRQKLGAIRFSDEQQRKMLNSIVGPAVLKKMLAEKEAHIRSGAKTVVLDIPLLFESGLTSWVDKVLVVYVDDDVQLRRLMARNGFTEEEALKRIRSQWPSEEKVKRADAVIDNNGNIEETRRQLLDILHQWDLLGKGGSGHHHHHH

SEQ ID NO: 4079 - DNA, 639 bp, synthetic construct
  misc_feature 1..639: note = Variant of 3'O-kinase
  source 1..639: mol_type = other DNA
atggcgtttaccattggtttaacaggagggatcgcagcgggcaaatcgactgtgagtgccatgatgcgtgaactgggtctgccggtcatcgatgctgacgaggcagcacgcgccgttatgaagccaggcgaagaagcgtatcgccaaattgtagctgcgttcggtccgggcattcttcgtgaggatggcgagatcgatcgccagaaactgggtgctatccgcttttcggacgaacaacaacgtaaggtgctgaattcgattgtaggtcctgcagtcctgaagaagatgctcgctgagaaagaagctcatatccgttcaggcgccaagacggttgtgctggatatcccgctgctgttcgaatccggattgactcagtgggtcgacaaagtgctcgtggtgtacgtcgatgatgatgttcagttacgccgccttatggcacgtaacgggtttactgaagaagaagctctgaagcgcattcgttcacagtggcccagtgcggagaaagttaaacgcgcagacgctgtcatcgacaataatggcaatattgaagaaacccgccgccagctgctggacattttacaccagtgggatctgctgggtaagggtggctccggccaccatcatcaccatcactaatga

SEQ ID NO: 4080 - protein, 211 aa, synthetic construct
  REGION 1..211: note = Variant of 3'O-kinase
MAFTIGLTGGIAAGKSTVSAMMRELGLPVIDADEAARAVMKPGEEAYRQIVAAFGPGILREDGEIDRQKLGAIRFSDEQQRKVLNSIVGPAVLKKMLAEKEAHIRSGAKTVVLDIPLLFESGLTQWVDKVLVVYVDDDVQLRRLMARNGFTEEEALKRIRSQWPSAEKVKRADAVIDNNGNIEETRRQLLDILHQWDLLGKGGSGHHHHHH

SEQ ID NO: 4081 - DNA, 639 bp, synthetic construct
  misc_feature 1..639: note = Variant of 3'O-kinase
  source 1..639: mol_type = other DNA
atggcggttaccattggtttaacaggagggatcgcagcgggcaaatcgactgtgagtgccatgatgcgtgaactgggtctgccggtcatcgatgctgacgaggcagcacgcgccgttatgaagccaggcgaagaagcgtatcgccaaattgtagctgcgttcggtccgggcattcttcgtgccgatggcgagatcgatcgccagaaactgggtgctatccgcttttcggacgaacaacaacgtaaggtgctgaattcgattgtaggtcctgcagtcctgaagaagatgctcgctgagaaagaagctcatatccgttcaggcgccaagacggttgtgctggatatcccgctgctgttcgaatccggattgacccattgggtcgacaaagtgctcgtggtgtacgtcgatgatgatgttcagttacgccgccttatggcacgtaacgggtttactgaagaagaagctctgaagcgcattcgttcacagtggcccagtgaggagaaagttaaaatggcagacgctgtcatcgacaataatggcaatattgaagaaacccgccgccagctgctggacattttacaccagtgggatctgctgggtaagggtggctccggccaccatcatcaccatcactaatga

SEQ ID NO: 4082 - protein, 211 aa, synthetic construct
  REGION 1..211: note = Variant of 3'O-kinase
MAVTIGLTGGIAAGKSTVSAMMRELGLPVIDADEAARAVMKPGEEAYRQIVAAFGPGILRADGEIDRQKLGAIRFSDEQQRKVLNSIVGPAVLKKMLAEKEAHIRSGAKTVVLDIPLLFESGLTHWVDKVLVVYVDDDVQLRRLMARNGFTEEEALKRIRSQWPSEEKVKMADAVIDNNGNIEETRRQLLDILHQWDLLGKGGSGHHHHHH

SEQ ID NO: 4083 - DNA, 639 bp, synthetic construct
  misc_feature 1..639: note = Variant of 3'O-kinase
  source 1..639: mol_type = other DNA
atggcgtttaccattggtttaacaggagggatcgcagcgggcaaatcgactgtgagtgccatgatgcgtgaactgggtctgccggtcatcgatgctgacgaggcagcacgcgccgttatgaagccaggcgaagaagcgtatcgcgacattgtagctgcgttcggtccgggcattcttcgtgaggatggcgagatcgatcgccagaaactgggtgctatccgcttttcggacgaacaacaacgcaaggtgctgaattcgattgtaggtcctgcagtcctgaagaagatgctcgctgagaaagaagctcatatccgctcaggcgccaagacggttgtgctggatatcccgctgctgttcgaatccggattgacttcgtgggtcgacaaagtgctcgtggtgtacgtcgatgatgatgttcagttacgccgccttatggcacgtaacgggtttactgaagaagaagctctgaagcgcattcgttcacagtggcccagtgcggagaaagttaaaatggcagacgctgtcatcgacaataatggcaatattgaagaaacccgccgccagctgctggacattttacaccagtgggatctgctgggtaagggtggctccggccaccatcatcaccatcactaatga

SEQ ID NO: 4084 - protein, 211 aa, synthetic construct
  REGION 1..211: note = Variant of 3'O-kinase
MAFTIGLTGGIAAGKSTVSAMMRELGLPVIDADEAARAVMKPGEEAYRDIVAAFGPGILREDGEIDRQKLGAIRFSDEQQRKVLNSIVGPAVLKKMLAEKEAHIRSGAKTVVLDIPLLFESGLTSWVDKVLVVYVDDDVQLRRLMARNGFTEEEALKRIRSQWPSAEKVKMADAVIDNNGNIEETRRQLLDILHQWDLLGKGGSGHHHHHH

SEQ ID NO: 4085 - DNA, 639 bp, synthetic construct
  misc_feature 1..639: note = Variant of 3'O-kinase
  source 1..639: mol_type = other DNA
atggcgtttaccattggtttaacaggagggatcgcagcgggcaaatcgactgtgagtgccatgatgcgtgaactgggtctgccggtcatcgatgctgacgaggcagcacgcgccgttatgaagccaggcgaagaagcgtatcgccagattgtagctgcgttcggtccgggcattcttcgcgccgatggcgagatcgatcgccagaaactgggtgctatccgcttttcggacgaacaacaacgtgaaatgctgaattcgattgtaggtcctgcagtcctgaagaagatgctcgctgagaaagaagctcatatccgctcaggcgccaagacggttgtgctggatatcccgctgctgttcgaatccggattgacccattgggtcgacaaagtgctcgtggtgtacgtcgatgatgatgttcagttacgccgccttatggcacgtaacgggtttactgaagaagaagctctgaagcgcattcgttcacagtggcccagtgcggagaaagttaaacgtgcagacgctgtcatcgacaataatggcaatattgaagaaacccgccgccagctgctggacattttacaccagtgggatctgctgggtaagggtggctccggccaccatcatcaccatcactaatga

SEQ ID NO: 4086 - protein, 211 aa, synthetic construct
  REGION 1..211: note = Variant of 3'O-kinase
MAFTIGLTGGIAAGKSTVSAMMRELGLPVIDADEAARAVMKPGEEAYRQIVAAFGPGILRADGEIDRQKLGAIRFSDEQQREMLNSIVGPAVLKKMLAEKEAHIRSGAKTVVLDIPLLFESGLTHWVDKVLVVYVDDDVQLRRLMARNGFTEEEALKRIRSQWPSAEKVKRADAVIDNNGNIEETRRQLLDILHQWDLLGKGGSGHHHHHH

SEQ ID NO: 4087 - DNA, 639 bp, synthetic construct
  misc_feature 1..639: note = Variant of 3'O-kinase
  source 1..639: mol_type = other DNA
atggcggttaccattggtttaacaggagggatcgcagcgggcaaatcgactgtgagtgccatgatgcgtgaactgggtctgccggtcatcgatgctgacgaggcagcacgcgccgttatgaagccaggcgaagaagcgtatcgccagattgtagctgcgttcggtccgggcattcttcgtgccgatggcgagatcgatcgccagaaactgggtgctatccgcttttcggacgaacaacaactgaaggtgctgaattcgattgtaggtcctgcagtcctgaagaagatgctcgctgagaaagaagctcatatcaagtcaggcgccaagacggttgtgctggatatcccgctgctgttcgaatccggattgcaacactgggtcgacaaagtgctcgtggtgtacgtcgatgatgatgttcagttacgccgccttatggcacgtaacgggtttactgaagaagaagctctgaagcgcattcgttcacagtggcccagtattgagaaagttaaacgcgcagacgctgtcatcgacaataatggcaatattgaagaaacccgccgccagctgctggacattttacaccagtgggatctgctgggcaagggtggctccggccaccatcatcaccatcactaatga

SEQ ID NO: 4088 - protein, 211 aa, synthetic construct
  REGION 1..211: note = Variant of 3'O-kinase
MAVTIGLTGGIAAGKSTVSAMMRELGLPVIDADEAARAVMKPGEEAYRQIVAAFGPGILRADGEIDRQKLGAIRFSDEQQLKVLNSIVGPAVLKKMLAEKEAHIKSGAKTVVLDIPLLFESGLQHWVDKVLVVYVDDDVQLRRLMARNGFTEEEALKRIRSQWPSIEKVKRADAVIDNNGNIEETRRQLLDILHQWDLLGKGGSGHHHHHH

SEQ ID NO: 4089 - DNA, 639 bp, synthetic construct
  misc_feature 1..639: note = Variant of 3'O-kinase
  source 1..639: mol_type = other DNA
atggcgtttaccattggtttaacaggagggatcgcagcgggcaaatcgactgtgagtgccatgatgcgtgaactgggtctgccggtcatcgatgctgacgaggcagcacgcgccgttatgaagccaggcgaagaagcgtatcgccaaattgtagctgcgttcggtccgggcattcttcgtgaggatggcgagatcgatcgccagaaactgggtgctatccgcttttcggacgaacaacaacgcaaggtgctgaattcgattgtaggtcctgcagtcctgaagaagatgctcgctgagaaagaagctcatatccgctcaggcgccaagacggttgtgctggatatcccgctgctgttcgaatccggattgacccattgggtcgacaaagtgctcgtggtgtacgtcgatgatgatgttcagttacgccgccttatggcacgtaacgggtttactgaagaagaagctctgaagcgcattcgttcacagtggcccagtgaggagaaagttaaacgcgcagacgctgtcatcgacaataatggcaatattgaagaaacccgccgccagctgctggacattttacaccagtgggatctgctgggcaagggtggctccggccaccatcatcaccatcactaatga

SEQ ID NO: 4090 - protein, 211 aa, synthetic construct
  REGION 1..211: note = Variant of 3'O-kinase
MAFTIGLTGGIAAGKSTVSAMMRELGLPVIDADEAARAVMKPGEEAYRQIVAAFGPGILREDGEIDRQKLGAIRFSDEQQRKVLNSIVGPAVLKKMLAEKEAHIRSGAKTVVLDIPLLFESGLTHWVDKVLVVYVDDDVQLRRLMARNGFTEEEALKRIRSQWPSEEKVKRADAVIDNNGNIEETRRQLLDILHQWDLLGKGGSGHHHHHH

SEQ ID NO: 4091 - DNA, 639 bp, synthetic construct
  misc_feature 1..639: note = Variant of 3'O-kinase
  source 1..639: mol_type = other DNA
atggcgtttaccattggtttaacaggagggatcgcagcgggcaaatcgactgtgagtgccatgatgcgtgaactgggtctgccggtcatcgatgctgacgaggcagcacgcgccgttatgaagccaggcgaagaagcgtatcgccaaattgtagctgcgttcggtccgggcattcttcgtgcggatggcgagatcgatcgccagaaactgggtgctatccgcttttcggacgaacaacaacgcaagatgctgaattcgattgtaggtcctgcagtcctgaagaagatgctcgctgagaaagaagctcatatcaagtcaggcgccaagacggttgtgctggatatcccgctgctgttcgaatccggattgagttcgtgggtcgacaaagtgctcgtggtgtacgtcgatgatgatgttcagttacgccgccttatggcacgtaacgggtttactgaagaagaagctctgaagcgcattcgttcacagtggcccagtattgagaaagttaaacgcgcagacgctgtcatcgacaataatggcaatattgaagaaacccgccgccagctgctggacattttacaccagtgggatctgctggacaagggtggctccggccaccatcatcaccatcactaatga

SEQ ID NO: 4092 - protein, 211 aa, synthetic construct
  REGION 1..211: note = Variant of 3'O-kinase
MAFTIGLTGGIAAGKSTVSAMMRELGLPVIDADEAARAVMKPGEEAYRQIVAAFGPGILRADGEIDRQKLGAIRFSDEQQRKMLNSIVGPAVLKKMLAEKEAHIKSGAKTVVLDIPLLFESGLSSWVDKVLVVYVDDDVQLRRLMARNGFTEEEALKRIRSQWPSIEKVKRADAVIDNNGNIEETRRQLLDILHQWDLLDKGGSGHHHHHH

SEQ ID NO: 4093 - DNA, 639 bp, synthetic construct
  misc_feature 1..639: note = Variant of 3'O-kinase
  source 1..639: mol_type = other DNA
atggcggttaccattggtttaacaggagggatcgcagcgggcaaatcgactgtgagtgccatgatgcgtgaactgggtctgccggtcatcgatgctgacgaggcagcacgcgccgttatgaagccaggcgaagaagcgtatcgcgacattgtagctgcgttcggtccgggcattcttcgtgaggatggcgagatcgatcgccagaaactgggtgctatccgcttttcggacgaacaacaactgaagatgctgaattcgattgtaggtcctgcagtcctgaagaagatgctcgctgagaaagaagctcatatccgctcaggcgccaagacggttgtgctggatatcccgctgctgttcgaatccggattgagttcgtgggtcgacaaagtgctcgtggtgtacgtcgatgatgatgttcagttacgccgccttatggcacgtaacgggtttactgaagaagaagctctgaagcgcattcgttcacagtggcccagtattgagaaagttaaaatggcagacgctgtcatcgacaataatggcaatattgaagaaacccgccgccagctgctggacattttacaccagtgggatctgctgggtaagggtggctccggccaccatcatcaccatcactaatga

SEQ ID NO: 4094 - protein, 211 aa, synthetic construct
  REGION 1..211: note = Variant of 3'O-kinase
MAVTIGLTGGIAAGKSTVSAMMRELGLPVIDADEAARAVMKPGEEAYRDIVAAFGPGILREDGEIDRQKLGAIRFSDEQQLKMLNSIVGPAVLKKMLAEKEAHIRSGAKTVVLDIPLLFESGLSSWVDKVLVVYVDDDVQLRRLMARNGFTEEEALKRIRSQWPSIEKVKMADAVIDNNGNIEETRRQLLDILHQWDLLGKGGSGHHHHHH

SEQ ID NO: 4095 - DNA, 639 bp, synthetic construct
  misc_feature 1..639: note = Variant of 3'O-kinase
  source 1..639: mol_type = other DNA
atggcgtttaccattggtttaacaggagggatcgcagcgggcaaatcgactgtgagtgccatgatgcgtgaactgggtctgccggtcatcgatgctgacgaggcagcacgcgccgttatgaagccaggcgaagaagcgtatcgcgacattgtagctgcgttcggtccgggcattcttcgtgaggatggcgagatcgatcgccagaaactgggtgctatccgcttttcggacgaacaacaacgcaagatgctgaattcgattgtaggtcctgcagtcctgaagaagatgctcgctgagaaagaagctcatatccgctcaggcgccaagacggttgtgctggatatcccgctgctgttcgaatccggattgagttcgtgggtcgacaaagtgctcgtggtgtacgtcgatgatgatgttcagttacgccgccttatggcacgtaacgggtttactgaagaagaagctctgaagcgcattcgttcacagtggcccagtgcggagaaagttaaaatggcagacgctgtcatcgacaataatggcaatattgaagaaacccgccgccagctgctggacattttacaccagtgggatctgctgggcaagggtggctccggccaccatcatcaccatcactaatga

SEQ ID NO: 4096 - protein, 211 aa, synthetic construct
  REGION 1..211: note = Variant of 3'O-kinase
MAFTIGLTGGIAAGKSTVSAMMRELGLPVIDADEAARAVMKPGEEAYRDIVAAFGPGILREDGEIDRQKLGAIRFSDEQQRKMLNSIVGPAVLKKMLAEKEAHIRSGAKTVVLDIPLLFESGLSSWVDKVLVVYVDDDVQLRRLMARNGFTEEEALKRIRSQWPSAEKVKMADAVIDNNGNIEETRRQLLDILHQWDLLGKGGSGHHHHHH

SEQ ID NO: 4097 - DNA, 639 bp, synthetic construct
  misc_feature 1..639: note = Variant of 3'O-kinase
  source 1..639: mol_type = other DNA
atggcgtttaccattggtttaacaggagggatcgcagcgggcaaatcgactgtgagtgccatgatgcgtgaactgggtctgccggtcatcgatgctgacgaggcagcacgcgccgttatgaagccaggcgaagaagcgtatcgccagattgtagctgcgttcggtccgggcattcttcgcgccgatggcgagatcgatcgccagaaactgggtcagatccgcttttcggacgaacaacaacgtaaggtgctgaattcgattgtaggtcctgcagtcctgaagaagatgctcgctgagaaagaagctcatatccgctcaggcgccaagacggttgtgctggatatcccgctgctgttcgaatccggattgacccattgggtcgacaaagtgctcgtggtgtacgtcgatgatgatgttcagttaaagcgccttatggcacgtaacgggtttactgaagaagaagctctgaagcgcattcgttcacagtggcccagtgcggagaaagttaaacgtgcagacgctgtgatcgacaataatggcaatgaagaagaaacccgccgccagctgctggacattttacaccagtgggatctgctgggtaagggtggctccggccaccatcatcaccatcactaatga

SEQ ID NO: 4098 - protein, 211 aa, synthetic construct
  REGION 1..211: note = Variant of 3'O-kinase
MAFTIGLTGGIAAGKSTVSAMMRELGLPVIDADEAARAVMKPGEEAYRQIVAAFGPGILRADGEIDRQKLGQIRFSDEQQRKVLNSIVGPAVLKKMLAEKEAHIRSGAKTVVLDIPLLFESGLTHWVDKVLVVYVDDDVQLKRLMARNGFTEEEALKRIRSQWPSAEKVKRADAVIDNNGNEEETRRQLLDILHQWDLLGKGGSGHHHHHH

SEQ ID NO: 4099 - DNA, 639 bp, synthetic construct
  misc_feature 1..639: note = Variant of 3'O-kinase
  source 1..639: mol_type = other DNA
atggcgtttaccattggtttaacaggagggatcgcagcgggcaaatcgactgtgagtgccatgatgcgtgaactgggtctgccggtcatcgatgctgacgaggcagcacgcgccgttatgaagccaggcgaagaagcgtatcgcgacattgtagctgcgttcggtccgggcattcttcgtgcggatggcgagatcgatcgccagaaactgggtgctatccgcttttcggacgaacaacaacgcaaggtgctgaattcgattgtaggtcctgcagtcctgaagaagatgctcgctgagaaagaagctcatatccgctcaggcgccaagacggttgtgctggatatcccgctgctgttcgaatccggattgcaacagtgggtcgacaaagtgctcgtggtgtacgtcgatgatgatgttcagttacgccgccttatggcacgtaacgggtttactgaagaagaagctctgaagcgcattcgttcacagtggcccagtattgagaaagttaaacgcgcagacgctgtcatcgacaataatggcaatattgaagaaacccgccgccagctgctggacattttacaccagtgggatctgctgggtaagggtggctccggccaccatcatcaccatcactaatga

SEQ ID NO: 4100 - protein, 211 aa, synthetic construct
  REGION 1..211: note = Variant of 3'O-kinase
MAFTIGLTGGIAAGKSTVSAMMRELGLPVIDADEAARAVMKPGEEAYRDIVAAFGPGILRADGEIDRQKLGAIRFSDEQQRKVLNSIVGPAVLKKMLAEKEAHIRSGAKTVVLDIPLLFESGLQQWVDKVLVVYVDDDVQLRRLMARNGFTEEEALKRIRSQWPSIEKVKRADAVIDNNGNIEETRRQLLDILHQWDLLGKGGSGHHHHHH

SEQ ID NO: 4101 - DNA, 639 bp, synthetic construct
  misc_feature 1..639: note = Variant of 3'O-kinase
  source 1..639: mol_type = other DNA
atggcggttaccattggtttaacaggagggatcgcagcgggcaaatcgactgtgagtgccatgatgcgtgaactgggtctgccggtcatcgatgctgacgaggcagcacgcgccgttatgaagccaggcgaagaagcgtatcgcgacattgtagctgcgttcggtccgggcattcttcgtgccgatggcgagatcgatcgccagaaactgggtgctatccgcttttcggacgaacaacaactgaagatgctgaattcgattgtaggtcctgcagtcctgaagaagatgctcgctgagaaagaagctcatatccgttcaggcgccaagacggttgtgctggatatcccgctgctgttcgaatccggattgagttcgtgggtcgacaaagtgctcgtggtgtacgtcgatgatgatgttcagttacgccgccttatggcacgtaacgggtttactgaagaagaagctctgaagcgcattcgttcacagtggcccagtgcggagaaagttaaacgcgcagacgctgtcatcgacaataatggcaatattgaagaaacccgccgccagctgctggacattttacaccagtgggatctgctggacaagggtggctccggccaccatcatcaccatcactaatga

SEQ ID NO: 4102 - protein, 211 aa, synthetic construct
  REGION 1..211: note = Variant of 3'O-kinase
MAVTIGLTGGIAAGKSTVSAMMRELGLPVIDADEAARAVMKPGEEAYRDIVAAFGPGILRADGEIDRQKLGAIRFSDEQQLKMLNSIVGPAVLKKMLAEKEAHIRSGAKTVVLDIPLLFESGLSSWVDKVLVVYVDDDVQLRRLMARNGFTEEEALKRIRSQWPSAEKVKRADAVIDNNGNIEETRRQLLDILHQWDLLDKGGSGHHHHHH

SEQ ID NO: 4103 - DNA, 639 bp, synthetic construct
  misc_feature 1..639: note = Variant of 3'O-kinase
  source 1..639: mol_type = other DNA
atggcgtttaccattggtttaacaggagggatcgcagcgggcaaatcgactgtgagtgccatgatgcgtgaactgggtctgccggtcatcgatgctgacgaggcagcacgcgccgttatgaagccaggcgaagaagcgtatcgccagattgtagctgcgttcggtccgggcattcttcgcgccgatggcgagatcgatcgccagaaactgggtgcgatccgcttttcggacgaacaacaacgcaaggtgctgaattcgattgtaggtcctgcagtcctgaagaagatgctcgctgagaaagaagctcatatccgctcaggcgccaagacggttgtgctggatatcccgctgctgttcgaatccggattgacccatgtggtcgacaaagtgctcgtggtgtacgtcgatgatgatgttcagttacgccgccttatggcacgtaacgggtttactgaagaagaagctctgaagcgcattcgttcacagtggcccagtgcggagaaagttaaacgtgcagacgctgtcatcgacaataatggcaatattgaagaaacccgccgccagctgctggacattttacaccagtgggatctgctgggtaagggtggctccggccaccatcatcaccatcactaatga

SEQ ID NO: 4104 - protein, 211 aa, synthetic construct
  REGION 1..211: note = Variant of 3'O-kinase
MAFTIGLTGGIAAGKSTVSAMMRELGLPVIDADEAARAVMKPGEEAYRQIVAAFGPGILRADGEIDRQKLGAIRFSDEQQRKVLNSIVGPAVLKKMLAEKEAHIRSGAKTVVLDIPLLFESGLTHVVDKVLVVYVDDDVQLRRLMARNGFTEEEALKRIRSQWPSAEKVKRADAVIDNNGNIEETRRQLLDILHQWDLLGKGGSGHHHHHH

SEQ ID NO: 4105 - DNA, 639 bp, synthetic construct
  misc_feature 1..639: note = Variant of 3'O-kinase
  source 1..639: mol_type = other DNA
atggcggttaccattggtttaacaggagggatcgcagcgggcaaatcgactgtgagtgccatgatgcgtgaactgggtctgccggtcatcgatgctgacgaggcagcacgcgccgttatgaagccaggcgaagaagcgtatcgcgacattgtagctgcgttcggtccgggcattcttcgtgcggatggcgagatcgatcgccagaaactgggtgctatccgcttttcggacgaacaacaactgaagatgctgaattcgattgtaggtcctgcagtcctgaagaagatgctcgctgagaaagaagctcatatccgctcaggcgccaagacggttgtgctggatatcccgctgctgttcgaatccggattgcaatcgtgggtcgacaaagtgctcgtggtgtacgtcgatgatgatgttcagttacgccgccttatggcacgtaacgggtttactgaagaagaagctctgaagcgcattcgttcacagtggcccagtgcggagaaagttaaaatggcagacgctgtcatcgacaataatggcaatattgaagaaacccgccgccagctgctggacattttacaccagtgggatctgctgggcaagggtggctccggccaccatcatcaccatcactaatga

SEQ ID NO: 4106 - protein, 211 aa, synthetic construct
  REGION 1..211: note = Variant of 3'O-kinase
MAVTIGLTGGIAAGKSTVSAMMRELGLPVIDADEAARAVMKPGEEAYRDIVAAFGPGILRADGEIDRQKLGAIRFSDEQQLKMLNSIVGPAVLKKMLAEKEAHIRSGAKTVVLDIPLLFESGLQSWVDKVLVVYVDDDVQLRRLMARNGFTEEEALKRIRSQWPSAEKVKMADAVIDNNGNIEETRRQLLDILHQWDLLGKGGSGHHHHHH

SEQ ID NO: 4107 - DNA, 639 bp, synthetic construct
  misc_feature 1..639: note = Variant of 3'O-kinase
  source 1..639: mol_type = other DNA
atggcgtttaccattggtttaacaggagggatcgcagcgggcaaatcgactgtgagtgccatgatgcgtgaactgggtctgccggtcatcgatgctgacgaggcagcacgcgccgttatgaagccaggcgaagaagcgtatcgccagattgtagctgcgttcggtccgggcattcttcgtgccgatggcgagatcgatcgccagaaactgggtgctatccgcttttcggacgaacaacaacgtaaggtgctgaattcgattgtaggtcctgcagtcctgaagaagatgctcgctgagaaagaagctcatatccgctcaggcgccaagacggttgtgctggatatcccgctgctgttcgaatccggattgacccattgggtcgacaaagtgctcgtggtgtacgtcgatgatgatgttcagttacgccgccttatggcacgtaacgggtttactgaagaagaagctctgaagcgcattcgttcacagtggcccagtgcggagaaagttaaacgtgcagacgctgtcatcgacaataatggcaatattgaagaaacccgccgccagctgctggacattttacaccagtgggatctgctggacaagggtggctccggccaccatcatcaccatcactaatga

SEQ ID NO: 4108 - protein, 211 aa, synthetic construct
  REGION 1..211: note = Variant of 3'O-kinase
MAFTIGLTGGIAAGKSTVSAMMRELGLPVIDADEAARAVMKPGEEAYRQIVAAFGPGILRADGEIDRQKLGAIRFSDEQQRKVLNSIVGPAVLKKMLAEKEAHIRSGAKTVVLDIPLLFESGLTHWVDKVLVVYVDDDVQLRRLMARNGFTEEEALKRIRSQWPSAEKVKRADAVIDNNGNIEETRRQLLDILHQWDLLDKGGSGHHHHHH

SEQ ID NO: 4109 - DNA, 639 bp, synthetic construct
  misc_feature 1..639: note = Variant of 3'O-kinase
  source 1..639: mol_type = other DNA
atggcgtttaccattggtttaacaggagggatcgcagcgggcaaatcgactgtgagtgccatgatgcgtgaactgggtctgccggtcatcgatgctgacgaggcagcacgcgccgttatgaagccaggcgaagaagcgtatcgccagattgtagctgcgttcggtccgggcattcttcgcgccgatggcgagatcgatcgccagaaactgggtgctatccgcttttcggacgaacaacaacgtgaaatgctgaattcgattgtaggtcctgcagtcctgaagaagatgctcgctgagaaagaagctttcatccgctcaggcgccaagacggttgtgctggatatcccgctgctgttcgaatccggattgacccattgggtcgacaaagtgctcgtggtgtacgtcgatgatgatgttcagttacgccgccttatggcacgtaacgggtttactgaagaagaagctctgaagcgcattcgttcacagtggcccagtgcggagaaagttaaacgtgcagacgctgtcatcgacaataatggcaatattgaagaaacccgccgccagctgctggacattttacaccagtgggatctgctgggtaagggtggctccggccaccatcatcaccatcactaatga

SEQ ID NO: 4110 - protein, 211 aa, synthetic construct
  REGION 1..211: note = Variant of 3'O-kinase
MAFTIGLTGGIAAGKSTVSAMMRELGLPVIDADEAARAVMKPGEEAYRQIVAAFGPGILRADGEIDRQKLGAIRFSDEQQREMLNSIVGPAVLKKMLAEKEAFIRSGAKTVVLDIPLLFESGLTHWVDKVLVVYVDDDVQLRRLMARNGFTEEEALKRIRSQWPSAEKVKRADAVIDNNGNIEETRRQLLDILHQWDLLGKGGSGHHHHHH

SEQ ID NO: 4111 - DNA, 639 bp, synthetic construct
  misc_feature 1..639: note = Variant of 3'O-kinase
  source 1..639: mol_type = other DNA
atggcgtttaccattggtttaacaggagggatcgcagcgggcaaatcgactgtgagtgccatgatgcgtgaactgggtctgccggtcatcgatgctgacgaggcagcacgcgccgttatgaagccaggcgaagaagcgtatcgccagattgtagctgcgttcggtccgggcattcttcgtgccgatggcgagatcgatcgccagaaactgggtcagatccgcttttcggacgaacaacaacgtgaaatgctgaattcgattgtaggtcctgcagtcctgaagaagatgctggctgagaaagaagctcatatccgctcaggcgccaagacggttgtgctggatatcccgctgctgttcgaatccggattgacccattgggtcgacaaagtgctcgtggtgtacgtcgatgatgatgttcagttaaagcgccttatggcacgtaacgggtttactgaagaagaagctctgaagcgcattcgttcacagtggcccagtgcggagaaagttaaacgtgcagacgctgtgatcgacaataatggcacgattgaagaaacccgccgccagctgctggccattttacaccagtgggatctgctgaataagggtggctccggccaccatcatcaccatcactaatga

SEQ ID NO: 4112 - protein, 211 aa, synthetic construct
  REGION 1..211: note = Variant of 3'O-kinase
MAFTIGLTGGIAAGKSTVSAMMRELGLPVIDADEAARAVMKPGEEAYRQIVAAFGPGILRADGEIDRQKLGQIRFSDEQQREMLNSIVGPAVLKKMLAEKEAHIRSGAKTVVLDIPLLFESGLTHWVDKVLVVYVDDDVQLKRLMARNGFTEEEALKRIRSQWPSAEKVKRADAVIDNNGTIEETRRQLLAILHQWDLLNKGGSGHHHHHH

SEQ ID NO: 4113 - DNA, 639 bp, synthetic construct
  misc_feature 1..639: note = Variant of 3'O-kinase
  source 1..639: mol_type = other DNA
atggcgtttaccattggtttaacaggagggatcgcagcgggcaaatcgactgtgagtgccatgatgcgtgaactgggtctgccggtcatcgatgctgacgaggcagcacgcgccgttatgaagccaggcgaagaagcgtatcgccagattgtagctgcgttcggtccgggcattcttcgtgccgatggcgagatcgatcgccagaaactgggtgctatccgcttttcggacgaacaacaacgtaaggtgctgaattcgattgtaggtcctgcagtcctgaagaagatgctcgctgagaaagaagctcatatccgctcaggcgccaagacggttgtgctggatatcccgctgctgttcgaatccggattgacccattgggtcgacaaagtgctcgtggtgtacgtcgatgatgatgttcagttacgccgccttatggcacgtaacgggtttactgaagaagaagctctgaagcgcattcgttcacagtggcccagtgcggagaaagttaaacgtgcagacgctgtcatcgacaataatggcaatgaagaagaaacccgccgccagctgctggacattttacaccagtgggatctgctgggtaagggtggctccggccaccatcatcaccatcactaatga

SEQ ID NO: 4114 - protein, 211 aa, synthetic construct
  REGION 1..211: note = Variant of 3'O-kinase
MAFTIGLTGGIAAGKSTVSAMMRELGLPVIDADEAARAVMKPGEEAYRQIVAAFGPGILRADGEIDRQKLGAIRFSDEQQRKVLNSIVGPAVLKKMLAEKEAHIRSGAKTVVLDIPLLFESGLTHWVDKVLVVYVDDDVQLRRLMARNGFTEEEALKRIRSQWPSAEKVKRADAVIDNNGNEEETRRQLLDILHQWDLLGKGGSGHHHHHH

SEQ ID NO: 4115 - DNA, 639 bp, synthetic construct
  misc_feature 1..639: note = Variant of 3'O-kinase
  source 1..639: mol_type = other DNA
atggcggttaccattggtttaacaggagggatcgcagcgggcaaatcgactgtgagtgccatgatgcgtgaactgggtctgccggtcatcgatgctgacgaggcagcacgcgccgttatgaagccaggcgaagaagcgtatcgcgacattgtagctgcgttcggtccgggcattcttcgtgcggatggcgagatcgatcgccagaaactgggtgctatccgcttttcggacgaacaacaacgcaaggtgctgaattcgattgtaggtcctgcagtcctgaagaagatgctcgctgagaaagaagctcatatccgttcaggcgccaagacggttgtgctggatatcccgctgctgttcgaatccggattgacccattgggtcgacaaagtgctcgtggtgtacgtcgatgatgatgttcagttacgccgccttatggcacgtaacgggtttactgaagaagaagctctgaagcgcattcgttcacagtggcccagtgaggagaaagttaaaatggcagacgctgtcatcgacaataatggcaatattgaagaaacccgccgccagctgctggacattttacaccagtgggatctgctgggtaagggtggctccggccaccatcatcaccatcactaatga

SEQ ID NO: 4116 - protein, 211 aa, synthetic construct
  REGION 1..211: note = Variant of 3'O-kinase
MAVTIGLTGGIAAGKSTVSAMMRELGLPVIDADEAARAVMKPGEEAYRDIVAAFGPGILRADGEIDRQKLGAIRFSDEQQRKVLNSIVGPAVLKKMLAEKEAHIRSGAKTVVLDIPLLFESGLTHWVDKVLVVYVDDDVQLRRLMARNGFTEEEALKRIRSQWPSEEKVKMADAVIDNNGNIEETRRQLLDILHQWDLLGKGGSGHHHHHH

SEQ ID NO: 4117 - DNA, 639 bp, synthetic construct
  misc_feature 1..639: note = Variant of 3'O-kinase
  source 1..639: mol_type = other DNA
atggcggttaccattggtttaacaggagggatcgcagcgggcaaatcgactgtgagtgccatgatgcgtgaactgggtctgccggtcatcgatgctgacgaggcagcacgcgccgttatgaagccaggcgaagaagcgtatcgcgacattgtagctgcgttcggtccgggcattcttcgtgaggatggcgagatcgatcgccagaaactgggtgctatccgcttttcggacgaacaacaacgcaagatgctgaattcgattgtaggtcctgcagtcctgaagaagatgctcgctgagaaagaagctcatatccgttcaggcgccaagacggttgtgctggatatcccgctgctgttcgaatccggattgacccattgggtcgacaaagtgctcgtggtgtacgtcgatgatgatgttcagttacgccgccttatggcacgtaacgggtttactgaagaagaagctctgaagcgcattcgttcacagtggcccagtgcggagaaagttaaacgcgcagacgctgtcatcgacaataatggcaatattgaagaaacccgccgccagctgctggacattttacaccagtgggatctgctgggcaagggtggctccggccaccatcatcaccatcactaatga

SEQ ID NO: 4118 - protein, 211 aa, synthetic construct
  REGION 1..211: note = Variant of 3'O-kinase
MAVTIGLTGGIAAGKSTVSAMMRELGLPVIDADEAARAVMKPGEEAYRDIVAAFGPGILREDGEIDRQKLGAIRFSDEQQRKMLNSIVGPAVLKKMLAEKEAHIRSGAKTVVLDIPLLFESGLTHWVDKVLVVYVDDDVQLRRLMARNGFTEEEALKRIRSQWPSAEKVKRADAVIDNNGNIEETRRQLLDILHQWDLLGKGGSGHHHHHH

SEQ ID NO: 4119 - DNA, 639 bp, synthetic construct
  misc_feature 1..639: note = Variant of 3'O-kinase
  source 1..639: mol_type = other DNA
atggcggttaccattggtttaacaggagggatcgcagcgggcaaatcgactgtgagtgccatgatgcgtgaactgggtctgccggtcatcgatgctgacgaggcagcacgcgccgttatgaagccaggcgaagaagcgtatcgccaaattgtagctgcgttcggtccgggcattcttcgtgccgatggcgagatcgatcgccagaaactgggtgctatccgcttttcggacgaacaacaacgcaagatgctgaattcgattgtaggtcctgcagtcctgaagaagatgctcgctgagaaagaagctcatatccgctcaggcgccaagacggttgtgctggatatcccgctgctgttcgaatccggattgacccattgggtcgacaaagtgctcgtggtgtacgtcgatgatgatgttcagttacgccgccttatggcacgtaacgggtttactgaagaagaagctctgaagcgcattcgttcacagtggcccagtattgagaaagttaaaatggcagacgctgtcatcgacaataatggcaatattgaagaaacccgccgccagctgctggacattttacaccagtgggatctgctgggtaagggtggctccggccaccatcatcaccatcactaatga

SEQ ID NO: 4120 - protein, 211 aa, synthetic construct
  REGION 1..211: note = Variant of 3'O-kinase
MAVTIGLTGGIAAGKSTVSAMMRELGLPVIDADEAARAVMKPGEEAYRQIVAAFGPGILRADGEIDRQKLGAIRFSDEQQRKMLNSIVGPAVLKKMLAEKEAHIRSGAKTVVLDIPLLFESGLTHWVDKVLVVYVDDDVQLRRLMARNGFTEEEALKRIRSQWPSIEKVKMADAVIDNNGNIEETRRQLLDILHQWDLLGKGGSGHHHHHH

SEQ ID NO: 4121 - DNA, 639 bp, synthetic construct
  misc_feature 1..639: note = Variant of 3'O-kinase
  source 1..639: mol_type = other DNA
atggcgtttaccattggtttaacaggagggatcgcagcgggcaaatcgactgtgagtgccatgatgcgtgaactgggtctgccggtcatcgatgctgacgaggcagcacgcgccgttatgaagccaggcgaagaagcgtatcgccaaattgtagctgcgttcggtccgggcattcttcgtgccgatggcgagatcgatcgccagaaactgggtgctatccgcttttcggacgaacaacaacgtaaggtgctgaattcgattgtaggtcctgcagtcctgaagaagatgctcgctgagaaagaagctcatatccgctcaggcgccaagacggttgtgctggatatcccgctgctgttcgaatccggattgcaatcgtgggtcgacaaagtgctcgtggtgtacgtcgatgatgatgttcagttacgccgccttatggcacgtaacgggtttactgaagaagaagctctgaagcgcattcgttcacagtggcccagtgcggagaaagttaaacgtgcagacgctgtcatcgacaataatggcaatattgaagaaacccgccgccagctgctggacattttacaccagtgggatctgctgggcaagggtggctccggccaccatcatcaccatcactaatga

SEQ ID NO: 4122 - protein, 211 aa, synthetic construct
  REGION 1..211: note = Variant of 3'O-kinase
MAFTIGLTGGIAAGKSTVSAMMRELGLPVIDADEAARAVMKPGEEAYRQIVAAFGPGILRADGEIDRQKLGAIRFSDEQQRKVLNSIVGPAVLKKMLAEKEAHIRSGAKTVVLDIPLLFESGLQSWVDKVLVVYVDDDVQLRRLMARNGFTEEEALKRIRSQWPSAEKVKRADAVIDNNGNIEETRRQLLDILHQWDLLGKGGSGHHHHHH

SEQ ID NO: 4123 - DNA, 639 bp, synthetic construct
  misc_feature 1..639: note = Variant of 3'O-kinase
  source 1..639: mol_type = other DNA
atggcgtttaccattggtttaacaggagggatcgcagcgggcaaatcgactgtgagtgccatgatgcgtgaactgggtctgccggtcatcgatgctgacgaggcagcacgcgccgttatgaagccaggcgaagaagcgtatcgccagattgtagctgcgttcggtccgggcattcttcgtgccgatggcgagatcgatcgccagaaactgggtgctatccgcttttcggacgaacaacaacgtaaggtgctgaattcgattgtaggtcctgcagtcctgaagaagatgctcgctgagaaagaagctcatatccgctcaggcgccaagacggttgtgctggatatcccgctgctgttcgaatccggattgacccattgggtcgacaaagtgctcgtggtgtacgtcgatgatgatgttcagttaaagcgccttatggcacgtaacgggtttactgaagaagaagctctgaagcgcattcgttcacagtggcccagtgcggagaaagttaaacgtgcagacgctgtcatcgacaataatggcaatattgaagaaacccgccgccagctgctggacattttacaccagtgggatctgctgggtaagggtggctccggccaccatcatcaccatcactaatga

SEQ ID NO: 4124 - protein, 211 aa, synthetic construct
  REGION 1..211: note = Variant of 3'O-kinase
MAFTIGLTGGIAAGKSTVSAMMRELGLPVIDADEAARAVMKPGEEAYRQIVAAFGPGILRADGEIDRQKLGAIRFSDEQQRKVLNSIVGPAVLKKMLAEKEAHIRSGAKTVVLDIPLLFESGLTHWVDKVLVVYVDDDVQLKRLMARNGFTEEEALKRIRSQWPSAEKVKRADAVIDNNGNIEETRRQLLDILHQWDLLGKGGSGHHHHHH

SEQ ID NO: 4125 - DNA, 639 bp, synthetic construct
  misc_feature 1..639: note = Variant of 3'O-kinase
  source 1..639: mol_type = other DNA
atggcgtttaccattggtttaacaggagggatcgcagcgggcaaatcgactgtgagtgccatgatgcgtgaactgggtctgccggtcatcgatgctgacgaggcagcacgcgccgttatgaagccaggcgaagaagcgtatcgcgacattgtagctgcgttcggtccgggcattcttcgtgccgatggcgagatcgatcgccagaaactgggtgctatccgcttttcggacgaacaacaacgcaagatgctgaattcgattgtaggtcctgcagtcctgaagaagatgctcgctgagaaagaagctcatatcaagtcaggcgccaagacgattgtgctggatatcccgctgctgttcgaatccggattgcaacactgggtcgacaaagtgctcgtggtgtacgtcgatgatgatgttcagttacgccgccttatggcacgtaacgggtttactgaagaagaagctctgaagcgcattcgttcacagtggcccagtgcggagaaagttaaacgtgcagacgctgtcatcgacaataatggcaatattgaagaaacccgccgccagctgctggacattttacaccagtgggatctgctgggcaagggtggctccggccaccatcatcaccatcactaatga

SEQ ID NO: 4126 - protein, 211 aa, synthetic construct
  REGION 1..211: note = Variant of 3'O-kinase
MAFTIGLTGGIAAGKSTVSAMMRELGLPVIDADEAARAVMKPGEEAYRDIVAAFGPGILRADGEIDRQKLGAIRFSDEQQRKMLNSIVGPAVLKKMLAEKEAHIKSGAKTIVLDIPLLFESGLQHWVDKVLVVYVDDDVQLRRLMARNGFTEEEALKRIRSQWPSAEKVKRADAVIDNNGNIEETRRQLLDILHQWDLLGKGGSGHHHHHH

SEQ ID NO: 4127 - DNA, 639 bp, synthetic construct
  misc_feature 1..639: note = Variant of 3'O-kinase
  source 1..639: mol_type = other DNA
atggcgtttaccattggtttaacaggagggatcgcagcgggcaaatcgactgtgagtgccatgatgcgtgaactgggtctgccggtcatcgatgctgacgaggcagcacgcgccgttatgaagccaggcgaagaagcgtatcgcgacattgtagctgcgttcggtccgggcattcttcgtgaggatggcgagatcgatcgccagaaactgggtgctatccgcttttcggacgaacaacaactgaagatgctgaattcgattgtaggtcctgcagtcctgaagaagatgctcgctgagaaagaagctcatatccgctcaggcgccaagacggttgtgctggatatcccgctgctgttcgaatccggattgacccattgggtcgacaaagtgctcgtggtgtacgtcgatgatgatgttcagttacgccgccttatggcacgtaacgggtttactgaagaagaagctctgaagcgcattcgttcacagtggcccagtgcggagaaagttaaacgcgcagacgctgtcatcgacaataatggcaatattgaagaaacccgccgccagctgctggacattttacaccagtgggatctgctgggtaagggtggctccggccaccatcatcaccatcactaatga

SEQ ID NO: 4128 - protein, 211 aa, synthetic construct
  REGION 1..211: note = Variant of 3'O-kinase
MAFTIGLTGGIAAGKSTVSAMMRELGLPVIDADEAARAVMKPGEEAYRDIVAAFGPGILREDGEIDRQKLGAIRFSDEQQLKMLNSIVGPAVLKKMLAEKEAHIRSGAKTVVLDIPLLFESGLTHWVDKVLVVYVDDDVQLRRLMARNGFTEEEALKRIRSQWPSAEKVKRADAVIDNNGNIEETRRQLLDILHQWDLLGKGGSGHHHHHH

SEQ ID NO: 4129 - DNA, 639 bp, synthetic construct
  misc_feature 1..639: note = Variant of 3'O-kinase
  source 1..639: mol_type = other DNA
atggcgtttaccattggtttaacaggagggatcgcagcgggcaaatcgactgtgagtgccatgatgcgtgaactgggtctgccggtcatcgatgctgacgaggcagcacgcgccgttatgaagccaggcgaagaagcgtatcgccaggttgtagctgcgttcggtccgggcattcttctggccgatggcgagatcgatcgccagaaactgggtgctatccgcttttcggacgaacaacaacgtgaaatgctgaattcgattgtaggtcctgcagtcctgaagaagatgctggctgagaaagaagctatgatccgctcaggcgccaagacggtcgtgctggatatcccgctgctgttcgaatccggattgacccatctggtcgacaaagtgctcgtggtgtacgttgatgatgatgttcagttaaagcgccttatggcacgtaacgggtttactgaagaagaagctctgaagcgcattcgttcacagtggcccagtgcggagaaagttaaacgtgcagacgcttggatcgacaataatggcaatattgaagaaacccgccgccagctgctggccattttacaccagtgggatctgctgggtaagggtggctccggccaccatcatcaccatcactaatga

SEQ ID NO: 4130 - protein, 211 aa, synthetic construct
  REGION 1..211: note = Variant of 3'O-kinase
MAFTIGLTGGIAAGKSTVSAMMRELGLPVIDADEAARAVMKPGEEAYRQVVAAFGPGILLADGEIDRQKLGAIRFSDEQQREMLNSIVGPAVLKKMLAEKEAMIRSGAKTVVLDIPLLFESGLTHLVDKVLVVYVDDDVQLKRLMARNGFTEEEALKRIRSQWPSAEKVKRADAWIDNNGNIEETRRQLLAILHQWDLLGKGGSGHHHHHH

SEQ ID NO: 4131 - DNA, 639 bp, synthetic construct
  misc_feature 1..639: note = Variant of 3'O-kinase
  source 1..639: mol_type = other DNA
atggcgtttaccattggtttaacaggagggatcgcagcgggcaaatcgactgtgagtgccatgatgcgtgaactgggtctgccggtcatcgatgctgacgaggcagcacgcgccgttatgaagccaggcgaagaagcgtatcgccagattgtagctgcgttcggtccgggcattcttcgcgccgatggcgagatcgatcgccagaaactgggtgctatccgcttttcggacgaacaacaacgtaaaatgctgaattcgattgtaggtcctgaggtcctggcgattatgctggctgagaaagaagctcatatccgctcaggcgccaagacggttgtgctggatatcccgctgctgttcgaatccggattgacccatctggtcgacaaagtgctcgtggtgtacgatgatgatgatgttcagttacgccgccttatggcacgtaacgggtttactgaagaagaagctctgaagcgcattcgttcacagtggcccagtgcggagaaagttaaacgtgcagacgctgtcatcgacaataatggcaatattgaagaaacccgccgccagctgctggccattttacaccagtgggatctgctgggtaagggtggctccggccaccatcatcaccatcactaatga

SEQ ID NO: 4132 - protein, 211 aa, synthetic construct
  REGION 1..211: note = Variant of 3'O-kinase
MAFTIGLTGGIAAGKSTVSAMMRELGLPVIDADEAARAVMKPGEEAYRQIVAAFGPGILRADGEIDRQKLGAIRFSDEQQRKMLNSIVGPEVLAIMLAEKEAHIRSGAKTVVLDIPLLFESGLTHLVDKVLVVYDDDDVQLRRLMARNGFTEEEALKRIRSQWPSAEKVKRADAVIDNNGNIEETRRQLLAILHQWDLLGKGGSGHHHHHH

SEQ ID NO: 4133 - DNA, 639 bp, synthetic construct
  misc_feature 1..639: note = Variant of 3'O-kinase
  source 1..639: mol_type = other DNA
atggcgtttaccattggtttaacaggagggatcgcagcgggcaaatcgactgtgagtgccatgatgcgtgaactgggtctgccggtcatcgatgctgacgaggcagcacgcgccgttatgaagccaggcgaagaagcgtatcgccagattgtagctgcgttcggtccgggcattcttctggccgatggcgagatcgatcgccagaaactgggtgctatccgcttttcggacgaacaacaacgtaaggtgctgaattcgattgtaggtcctgcagtcctgaagaagatgctggctgagaaagaagctcatatccgctcaggcgccaagacggttgtgctggatatcccgctgctgttcgaatccggattgacccattgggtcgacaaagtgctcgtggtgtacgtcgatgatgatgttcagttacgccgccttatggcacgtaacgggtttactgaagaagaagctctgaagcgcattcgttcacagtggcccagtgcggagaaagttaaacgtgcagacgctgtcatcgacaataatggcaatgaagaagaaacccgccgccagctgctggacattttacaccagtgggatctgctgggtaagggtggctccggccaccatcatcaccatcactaatga

SEQ ID NO: 4134 - protein, 211 aa, synthetic construct
  REGION 1..211: note = Variant of 3'O-kinase
MAFTIGLTGGIAAGKSTVSAMMRELGLPVIDADEAARAVMKPGEEAYRQIVAAFGPGILLADGEIDRQKLGAIRFSDEQQRKVLNSIVGPAVLKKMLAEKEAHIRSGAKTVVLDIPLLFESGLTHWVDKVLVVYVDDDVQLRRLMARNGFTEEEALKRIRSQWPSAEKVKRADAVIDNNGNEEETRRQLLDILHQWDLLGKGGSGHHHHHH

SEQ ID NO: 4135 - DNA, 639 bp, synthetic construct
  misc_feature 1..639: note = Variant of 3'O-kinase
  source 1..639: mol_type = other DNA
atggcgtttaccattggtttaacaggagggatcgcagcgggcaaatcgactgtgagtgccatgatgcgtgaactgggtctgccggtcatcgatgctgacgaggcagcacgcgccgttatgaagccaggcgaagaagcgtatcgccagattgtagctgcgttcggtccgggcattcttcgtgccgatggcgagatcgatcgccagaaactgggtgctatccgcttttcggacgaacaacaacgcaagatgctgaattcgattgtaggtcctgcagtcctgaagaagatgctcgctgagaaagaagctcatatcaagtcaggcgccaagacggttgtgctggatatcccgctgctgttcgaatccggattgacccattgggtcgacaaagtgctcgtggtgtacgtcgatgatgatgttcagttacgccgccttatggcacgtaacgggtttactgaagaagaagctctgaagcgcattcgttcacagtggcccagtgaggagaaagttaaacgcgcagacgctgtcatcgacaataatggcaatattgaagaaacccgccgccagctgctggacattttacaccagtgggatctgctgggtaagggtggctccggccaccatcatcaccatcactaatga

SEQ ID NO: 4136 - protein, 211 aa, synthetic construct
  REGION 1..211: note = Variant of 3'O-kinase
MAFTIGLTGGIAAGKSTVSAMMRELGLPVIDADEAARAVMKPGEEAYRQIVAAFGPGILRADGEIDRQKLGAIRFSDEQQRKMLNSIVGPAVLKKMLAEKEAHIKSGAKTVVLDIPLLFESGLTHWVDKVLVVYVDDDVQLRRLMARNGFTEEEALKRIRSQWPSEEKVKRADAVIDNNGNIEETRRQLLDILHQWDLLGKGGSGHHHHHH

SEQ ID NO: 4137 - DNA, 639 bp, synthetic construct
  misc_feature 1..639: note = Variant of 3'O-kinase
  source 1..639: mol_type = other DNA
atggcgtttaccattggtttaacaggagggatcgcagcgggcaaatcgactgtgagtgccatgatgcgtgaactgggtctgccggtcatcgatgctgacgaggcagcacgcgccgttatgaagccaggcgaagaagcgtatcgcgacattgtagctgcgttcggtccgggcattcttcgtgcggatggcgagatcgatcgccagaaactgggtgctatccgcttttcggacgaacaacaacgcaagatgctgaattcgattgtaggtcctgcagtcctgaagaagatgctcgctgagaaagaagctcatatcaagtcaggcgccaagacggttgtgctggatatcccgctgctgttcgaatccggattgcaacagtgggtcgacaaagtgctcgtggtgtacgtcgatgatgatgttcagttacgccgccttatggcacgtaacgggtttactgaagaagaagctctgaagcgcattcgttcacagtggcccagtattgagaaagttaaacgcgcagacgctgtcatcgacaataatggcaatattgaagaaacccgccgccagctgctggacattttacaccagtgggatctgctgggcaagggtggctccggccaccatcatcaccatcactaatga

SEQ ID NO: 4138 - protein, 211 aa, synthetic construct
  REGION 1..211: note = Variant of 3'O-kinase
MAFTIGLTGGIAAGKSTVSAMMRELGLPVIDADEAARAVMKPGEEAYRDIVAAFGPGILRADGEIDRQKLGAIRFSDEQQRKMLNSIVGPAVLKKMLAEKEAHIKSGAKTVVLDIPLLFESGLQQWVDKVLVVYVDDDVQLRRLMARNGFTEEEALKRIRSQWPSIEKVKRADAVIDNNGNIEETRRQLLDILHQWDLLGKGGSGHHHHHH

SEQ ID NO: 4139 - DNA, 639 bp, synthetic construct
  misc_feature 1..639: note = Variant of 3'O-kinase
  source 1..639: mol_type = other DNA
atggcgtttaccattggtttaacaggagggatcgcagcgggcaaatcgactgtgagtgccatgatgcgtgaactgggtctgccggtcatcgatgctgacgaggcagcacgcgccgttatgaagccaggcgaagaagcgtatcgccaaattgtagctgcgttcggtccgggcattcttcgtgcggatggcgagatcgatcgccagaaactgggtgctatccgcttttcggacgaacaacaacgcaaggtgctgaattcgattgtaggtcctgcagtcctgaagaagatgctcgctgagaaagaagctcatatcaagtcaggcgccaagacggttgtgctggatatcccgctgctgttcgaatccggattgacccattgggtcgacaaagtgctcgtggtgtacgtcgatgatgatgttcagttacgccgccttatggcacgtaacgggtttactgaagaagaagctctgaagcgcattcgttcacagtggcccagtgcggagaaagttaaacgcgcagacgctgtcatcgacaataatggcaatattgaagaaacccgccgccagctgctggacattttacaccagtgggatctgctgggtaagggtggctccggccaccatcatcaccatcactaatga

SEQ ID NO: 4140 - protein, 211 aa, synthetic construct
  REGION 1..211: note = Variant of 3'O-kinase
MAFTIGLTGGIAAGKSTVSAMMRELGLPVIDADEAARAVMKPGEEAYRQIVAAFGPGILRADGEIDRQKLGAIRFSDEQQRKVLNSIVGPAVLKKMLAEKEAHIKSGAKTVVLDIPLLFESGLTHWVDKVLVVYVDDDVQLRRLMARNGFTEEEALKRIRSQWPSAEKVKRADAVIDNNGNIEETRRQLLDILHQWDLLGKGGSGHHHHHH

SEQ ID NO: 4141 - DNA, 639 bp, synthetic construct
  misc_feature 1..639: note = Variant of 3'O-kinase
  source 1..639: mol_type = other DNA
atggcgtttaccattggtttaacaggagggatcgcagcgggcaaatcgactgtgagtgccatgatgcgtgaactgggtctgccggtcatcgatgctgacgaggcagcacgcgccgttatgaagccaggcgaagaagcgtatcgccagattgtagctgcgttcggtccgggcattcttcgtgccgatggcgagatcgatcgccagaaactgggtgctatccgcttttcggacgaacaacaacgtaaggtgctgaattcgattgtaggtcctgcagtcctgaagaagatgctcgctgagaaagaagctcatatccgctcaggcgccaagacgatcgtgctggatatcccgctgctgttcgaatccggattgacccatgtggtcgacaaagtgctcgtggtgtacgatgatgatgatgttcagttacgtcgccttatggcacgtaacgggtttactgaagaagaagctctgaagcgcattcgttcacagtggcccagtgcggagaaagttaaacgtgcagacgcttggatcgacaataatggcaatgaagaagaaacccgccgccagctgctggacattttacaccagtgggatctgctgggtaagggtggctccggccaccatcatcaccatcactaatga

SEQ ID NO: 4142 - protein, 211 aa, synthetic construct
  REGION 1..211: note = Variant of 3'O-kinase
MAFTIGLTGGIAAGKSTVSAMMRELGLPVIDADEAARAVMKPGEEAYRQIVAAFGPGILRADGEIDRQKLGAIRFSDEQQRKVLNSIVGPAVLKKMLAEKEAHIRSGAKTIVLDIPLLFESGLTHVVDKVLVVYDDDDVQLRRLMARNGFTEEEALKRIRSQWPSAEKVKRADAWIDNNGNEEETRRQLLDILHQWDLLGKGGSGHHHHHH

SEQ ID NO: 4143 - DNA, 639 bp, synthetic construct
  misc_feature 1..639: note = Variant of 3'O-kinase
  source 1..639: mol_type = other DNA
atggcgtttaccattggtttaacaggagggatcgcagcgggcaaatcgactgtgagtgccatgatgcgtgaactgggtctgccggtcatcgatgctgacgaggcagcacgcgccgttatgaagccaggcgaagaagcgtatcgccaaattgtagctgcgttcggtccgggcattcttcgtgccgatggcgagatcgatcgccagaaactgggtgctatccgcttttcggacgaacaacaacgcaagatgctgaattcgattgtaggtcctgcagtcctgaagaagatgctcgctgagaaagaagctcatatccgctcaggcgccaagacggttgtgctggatatcccgctgctgttcgaatccggattgacttcgtgggtcgacaaagtgctcgtggtgtacgtcgatgatgatgttcagttacgccgccttatggcacgtaacgggtttactgaagaagaagctctgaagcgcattcgttcacagtggcccagtgcggagaaagttaaaatggcagacgctgtcatcgacaataatggcaatattgaagaaacccgccgccagctgctggacattttacaccagtgggatctgctgggtaagggtggctccggccaccatcatcaccatcactaatga

SEQ ID NO: 4144 - protein, 211 aa, synthetic construct
  REGION 1..211: note = Variant of 3'O-kinase
MAFTIGLTGGIAAGKSTVSAMMRELGLPVIDADEAARAVMKPGEEAYRQIVAAFGPGILRADGEIDRQKLGAIRFSDEQQRKMLNSIVGPAVLKKMLAEKEAHIRSGAKTVVLDIPLLFESGLTSWVDKVLVVYVDDDVQLRRLMARNGFTEEEALKRIRSQWPSAEKVKMADAVIDNNGNIEETRRQLLDILHQWDLLGKGGSGHHHHHH

SEQ ID NO: 4145 - DNA, 639 bp, synthetic construct
  misc_feature 1..639: note = Variant of 3'O-kinase
  source 1..639: mol_type = other DNA
atggcgtttaccattggtttaacaggagggatcgcagcgggcaaatcgactgtgagtgccatgatgcgtgaactgggtctgccggtcatcgatgctgacgaggcagcacgcgccgttatgaagccaggcgaagaagcgtatcgccaggttgtagctgcgttcggtccgggcattcttctggccgatggcgagatcgatcgccagaaactgggtcagatccgcttttcggacgaacaacaacgcaaggtgctgaatgcgattgtaggtcctgcagtcctgaagaagatgctcgctgagaaagaagctctgatccgctcaggcgccaagacggttgtgctggatatcccgctgctgttcgaatccggattgacccattgggtcgacaaagtgctcgtggtgtacgtcgatgatgatgttcagttacgccgccttatggcacgtaacgggtttactgaagaagaagctctgaagcgcattcgttcacagtggcccagtgcggagaaagttaaacgtgcagacgctgtcatcgacaataatggcaatattgaagaaacccgccgccagctgctggacattttacaccagtgggatctgctgggtaagggtggctccggccaccatcatcaccatcactaatga

SEQ ID NO: 4146 - protein, 211 aa, synthetic construct
  REGION 1..211: note = Variant of 3'O-kinase
MAFTIGLTGGIAAGKSTVSAMMRELGLPVIDADEAARAVMKPGEEAYRQVVAAFGPGILLADGEIDRQKLGQIRFSDEQQRKVLNAIVGPAVLKKMLAEKEALIRSGAKTVVLDIPLLFESGLTHWVDKVLVVYVDDDVQLRRLMARNGFTEEEALKRIRSQWPSAEKVKRADAVIDNNGNIEETRRQLLDILHQWDLLGKGGSGHHHHHH

SEQ ID NO: 4147 - DNA, 639 bp, synthetic construct
  misc_feature 1..639: note = Variant of 3'O-kinase
  source 1..639: mol_type = other DNA
atggcgtttaccattggtttaacaggagggatcgcagcgggcaaatcgactgtgagtgccatgatgcgtgaactgggtctgccggtcatcgatgctgacgaggcagcacgcgccgttatgaagccaggcgaagaagcgtatcgccagattgtagctgcgttcggtccgggcattcttcgtgccgatggcgagatcgatcgccagaaactgggtgctatccgcttttcggacgaacaacaacgtaaggtgctgaattcgattgtaggtcctgcagtcctgaagaagatgctcgctgagaaagaagctcatatccgctcaggcgccaagacggttgtgctggatatcccgctgctgttcgaatccggattgacccattgggtcgacaaagtgctcgtggtgtacgtcgatgatgatgttcagttacgccgccttatggcacgtaacgggtttactgaagaagaagctctgaagcgcattcgttcacagtggcccagtgcggagaaagttaaacgtgcagacgctgtcatcgacaataatggcaatattgaagaaacccgccgccagctgctggccattttacaccagtgggatctgctggataagggtggctccggccaccatcatcaccatcactaatga

SEQ ID NO: 4148 - protein, 211 aa, synthetic construct
  REGION 1..211: note = Variant of 3'O-kinase
MAFTIGLTGGIAAGKSTVSAMMRELGLPVIDADEAARAVMKPGEEAYRQIVAAFGPGILRADGEIDRQKLGAIRFSDEQQRKVLNSIVGPAVLKKMLAEKEAHIRSGAKTVVLDIPLLFESGLTHWVDKVLVVYVDDDVQLRRLMARNGFTEEEALKRIRSQWPSAEKVKRADAVIDNNGNIEETRRQLLAILHQWDLLDKGGSGHHHHHH

SEQ ID NO: 4149 - DNA, 639 bp, synthetic construct
  misc_feature 1..639: note = Variant of 3'O-kinase
  source 1..639: mol_type = other DNA
atggcggttaccattggtttaacaggagggatcgcagcgggcaaatcgactgtgagtgccatgatgcgtgaactgggtctgccggtcatcgatgctgacgaggcagcacgcgccgttatgaagccaggcgaagaagcgtatcgcgacattgtagctgcgttcggtccgggcattcttcgtgcggatggcgagatcgatcgccagaaactgggtgctatccgcttttcggacgaacaacaacgtaaggtgctggcttcgattgtaggtcctgcagtcctgaagaagatgctggctgagaaagaagctcatatcaagtcaggcgccaagacggttgtgctggatatcccgctgctgttcgaatccggattgcaatcgtgggtcgacaaagttctcgtggtgtacgtcgatgatgatgttcagttacgccgccttatggcacgtaacgggtttactgaagaagaagctctgaagcgcattcgttcacagtggcccagtgcggagaaagttaaacgtgcagacgctgtcatcgacaataatggcaatattgaagaaacccgccgccagctgctggacattttacaccagtgggatctgctggacaagggtggctccggccaccatcatcaccatcactaatga

SEQ ID NO: 4150 - protein, 211 aa, synthetic construct
  REGION 1..211: note = Variant of 3'O-kinase
MAVTIGLTGGIAAGKSTVSAMMRELGLPVIDADEAARAVMKPGEEAYRDIVAAFGPGILRADGEIDRQKLGAIRFSDEQQRKVLASIVGPAVLKKMLAEKEAHIKSGAKTVVLDIPLLFESGLQSWVDKVLVVYVDDDVQLRRLMARNGFTEEEALKRIRSQWPSAEKVKRADAVIDNNGNIEETRRQLLDILHQWDLLDKGGSGHHHHHH

SEQ ID NO: 4151 - DNA, 639 bp, synthetic construct
  misc_feature 1..639: note = Variant of 3'O-kinase
  source 1..639: mol_type = other DNA
atggcggttaccattggtttaacaggagggatcgcagcgggcaaatcgactgtgagtgccatgatgcgtgaactgggtctgccggtcatcgatgctgacgaggcagcacgcgccgttatgaagccaggcgaagaagcgtatcgcgacattgtagctgcgttcggtccgggcattcttcgtgcggatggcgagatcgatcgccagaaactgggtgctatccgcttttcggacgaacaacaacgtaaggtgctgaattcgattgtaggtcctgcagtcctgaagaagatgctcgctgagaaggaagctcatatcgggtcaggcgccaagacggttgtgctggatatcccgctgctgttcgaatccggattgcaatcgtgggtcgacaaagttctcgtggtgtacgtcgatgatgatgttcagttacgccgccttatggcacgtaacgggtttactgaagaagaagctctgaagcgcattcgttcacagtggcccagtgcggagaaagttaaacgtgcagacgctgtcatcgacaataatggcaatattgaagaaacccgccgccagctgctggacattttacaccagtgggatctgctggaccacggtggctccggccaccatcatcaccatcactaatga

SEQ ID NO: 4152 - protein, 211 aa, synthetic construct
  REGION 1..211: note = Variant of 3'O-kinase
MAVTIGLTGGIAAGKSTVSAMMRELGLPVIDADEAARAVMKPGEEAYRDIVAAFGPGILRADGEIDRQKLGAIRFSDEQQRKVLNSIVGPAVLKKMLAEKEAHIGSGAKTVVLDIPLLFESGLQSWVDKVLVVYVDDDVQLRRLMARNGFTEEEALKRIRSQWPSAEKVKRADAVIDNNGNIEETRRQLLDILHQWDLLDHGGSGHHHHHH

SEQ ID NO: 4153 - DNA, 639 bp, synthetic construct
  misc_feature 1..639: note = Variant of 3'O-kinase
  source 1..639: mol_type = other DNA
atggcggttaccattggtttaacaggagggatcgcagcgggcaaatcgactgtgagtgccatgatgcgtgaactgggtctgccggtcatcgatgctgacgaggcagcacgcgccgttatgaagccaggcgaagaagcgtatcgcgacattgtagctgcgttcggtccgggcattcttcgtgcggatggcgagatcgatcgccagaaactgggtgctatccgcttttcggacgaacaacaacgtaaggtgctgaattcgattgtaggtcctgcagtcctgaagaagatgctcgctgagaaagaagctcatatcaagtcaggcgccaagacggttgtgctggatatcccgctgctgttcgaatccggattgcaatcgtgggtcgacaaagttctcgtggtgtacgtcgatgatgatgttcagttacgccgccttatggcacgtaacgggtttactgaagaagaagctctgaagcgcattcgttcacagtggcccagtgcggagaaagttaagatggcagacgctgtcatcgacaataatggcaatattgaagaaacccgccgccagctgctggacattttacaccagtgggatctgctggactcgggtggctccggccaccatcatcaccatcactaatga

SEQ ID NO: 4154 - protein, 211 aa, synthetic construct
  REGION 1..211: note = Variant of 3'O-kinase
MAVTIGLTGGIAAGKSTVSAMMRELGLPVIDADEAARAVMKPGEEAYRDIVAAFGPGILRADGEIDRQKLGAIRFSDEQQRKVLNSIVGPAVLKKMLAEKEAHIKSGAKTVVLDIPLLFESGLQSWVDKVLVVYVDDDVQLRRLMARNGFTEEEALKRIRSQWPSAEKVKMADAVIDNNGNIEETRRQLLDILHQWDLLDSGGSGHHHHHH

SEQ ID NO: 4155 - DNA, 639 bp, synthetic construct
  misc_feature 1..639: note = Variant of 3'O-kinase
  source 1..639: mol_type = other DNA
atggcggttaccattggtttaacaggagggatcgcagcgggcaaatcgactgtgagtgccatgatgcgtgaactgggtctgccggtcatcgatgctgacgaggcagcacgcgccgttatgaagccaggcgaagaagcgtatcgcgacattgtagctgcgttcggtccgggcattcttcgtgaagatggcgagatcgatcgccagaaactgggtgctatccgcttttcggacgaacaacaacgtaaggtgctgaattcgattgtaggtcctgcagtcctgaagaagatgctcgctgagaaagaagctcatatcaagtcaggcgccaagacggttgtgctggatatcccgctgctgttcgaatccggattgcaatcgtgggtcgacaaagttctcgtggtgtacgtcgatgatgatgttcagttacgccgccttatggcacgtaacgggtttactgaagaagaagctctgaagcgcattcgttcacagtggcccagtgcggagaaagttaaacgtgcagacgctgtcatcgacaataatggcaatattgaagaaacccgccgccagctgctggacattttacaccagtgggatctgctggacaagggtggctccggccaccatcatcaccatcactaatga

SEQ ID NO: 4156 - protein, 211 aa, synthetic construct
  REGION 1..211: note = Variant of 3'O-kinase
MAVTIGLTGGIAAGKSTVSAMMRELGLPVIDADEAARAVMKPGEEAYRDIVAAFGPGILREDGEIDRQKLGAIRFSDEQQRKVLNSIVGPAVLKKMLAEKEAHIKSGAKTVVLDIPLLFESGLQSWVDKVLVVYVDDDVQLRRLMARNGFTEEEALKRIRSQWPSAEKVKRADAVIDNNGNIEETRRQLLDILHQWDLLDKGGSGHHHHHH

SEQ ID NO: 4157 - DNA, 639 bp, synthetic construct
  misc_feature 1..639: note = Variant of 3'O-kinase
  source 1..639: mol_type = other DNA
atggcggttaccattggtttaacaggagggatcgcagcgggcaaatcgactgtgagtgccatgatgcgtgaactgggtctgccggtcatcgatgctgacgaggcagctcgcgccgttatgaagccaggcgaagaagcgtatcgcgacattgtagctgcgttcggtccgggcattcttcgtgcggatggcgagatcgatcgccagaaactgggtgctatccgcttttcggacgaaggccaacgtaaggtgctgaattcgattgtaggtcctgcagtcctgaagaagatgctcgctgagaaagaagctcatatcaagtcaggcgccaagacggttgtgctggatatcccgctgctgttcgaatccggattgcaatcgatggtcgacaaagttctcgtggtgtacgtcgatgatgatgttcagttacgccgccttatggcacgtaacgggtttactgaagaagaagctctgaagcgcattcgttcacagtggcccagtgcggagaaagttaaacgtgcagacgctgtcatcgacaataatggcaatattgaagaaacccgccgccagctgctggacattttacaccagtgggatctgctggacaagggtggctgcggccaccatcatcaccatcactaatga

SEQ ID NO: 4158 - protein, 211 aa, synthetic construct
  REGION 1..211: note = Variant of 3'O-kinase
MAVTIGLTGGIAAGKSTVSAMMRELGLPVIDADEAARAVMKPGEEAYRDIVAAFGPGILRADGEIDRQKLGAIRFSDEGQRKVLNSIVGPAVLKKMLAEKEAHIKSGAKTVVLDIPLLFESGLQSMVDKVLVVYVDDDVQLRRLMARNGFTEEEALKRIRSQWPSAEKVKRADAVIDNNGNIEETRRQLLDILHQWDLLDKGGCGHHHHHH

SEQ ID NO: 4159 - DNA, 639 bp, synthetic construct
  misc_feature 1..639: note = Variant of 3'O-kinase
  source 1..639: mol_type = other DNA
atggcggttaccattggtttaacaggagggatcgcagcgggcaaatcgactgtgagtgccatgatgcgtgaactgggtctgccggtcatcgatgctgacgaggcagcacgcgccgttatgaagccaggcgaagaagcgtatcgcgacattgtagctgcgttcggtccgggcattcttcgtgcggatggcgagatcgatcgccagaaactgggtgctatccgcttttcggacgaacaacaacgtaaggtgctgcgttcgattgtaggtcctgcagtcctgaagaagatgaacgctgagaaagaagctcatatcaagtcaggcgccaagacggttgtgctggatatcccgctgctgttcgaatccggattgcaatcgtgggtcgacaaagttctcgtggtgtacgtcgatgatgatgttcagttacgccgccttatggcacgtaacgggtttactgaagaagaagctctgaagcgcattcgttcacagtggcccagtgcggagaaagttaaacgtgcagacgctgtcatcgacaataatggcaatattgaagaaacccgccgccagctgctggacattttacaccagtgggatctgctggacaagggtggctccggccaccatcatcaccatcactaatga

SEQ ID NO: 4160 - protein, 211 aa, synthetic construct
  REGION 1..211: note = Variant of 3'O-kinase
MAVTIGLTGGIAAGKSTVSAMMRELGLPVIDADEAARAVMKPGEEAYRDIVAAFGPGILRADGEIDRQKLGAIRFSDEQQRKVLRSIVGPAVLKKMNAEKEAHIKSGAKTVVLDIPLLFESGLQSWVDKVLVVYVDDDVQLRRLMARNGFTEEEALKRIRSQWPSAEKVKRADAVIDNNGNIEETRRQLLDILHQWDLLDKGGSGHHHHHH

SEQ ID NO: 4161 - DNA, 639 bp, synthetic construct
  misc_feature 1..639: note = Variant of 3'O-kinase
  source 1..639: mol_type = other DNA
atggcggttaccattggtttaacaggagggatcgcagcgggcaaatcgactgtgagtgccatgatgcgtgaactgggtctgccggtcatcgatgctgacgagatggcacgcgccgttatgaagccaggcgaagaagcgtatcgcgacgaagtagctgcgttcggtccgggcattcttcgtgcggatggcgagatcgatcgccagaaactgggtgctatccgcttttcggacgaacaacaacgtaaggtgctgaattcgattgtaggtcctgcagtcctgaagaagatgctcgctgagaaagaagctcatatcaagtcaggcgccaagacggttgtgctggatatcccgctgctgttcgaatccggattgcaatcgtgggtcgacaaagttctcgtggtgtacgtcgatgatgatgttcagttacgccgccttatggcacgtaacgggtttactgaagaagaagctctgaagcgcattcgttcacagtggcccagtgcggagaaagttaaacgtgcagacgctgtcatcgacaataatggcaatattgaagaaacccgccgccagctgctggacattttacaccagtgggatctgctggacaagggtggctccggccaccatcatcaccatcactaatga

SEQ ID NO: 4162 - protein, 211 aa, synthetic construct
  REGION 1..211: note = Variant of 3'O-kinase
MAVTIGLTGGIAAGKSTVSAMMRELGLPVIDADEMARAVMKPGEEAYRDEVAAFGPGILRADGEIDRQKLGAIRFSDEQQRKVLNSIVGPAVLKKMLAEKEAHIKSGAKTVVLDIPLLFESGLQSWVDKVLVVYVDDDVQLRRLMARNGFTEEEALKRIRSQWPSAEKVKRADAVIDNNGNIEETRRQLLDILHQWDLLDKGGSGHHHHHH

SEQ ID NO: 4163 - DNA, 639 bp, synthetic construct
  misc_feature 1..639: note = Variant of 3'O-kinase
  source 1..639: mol_type = other DNA
atggcggttaccattggtttaacaggagggatcgcagatggcaaatcgactgtgagtgccatgatgcgtgaactgggtctgccggtcatcgatgctgacgaggcagcacgcgccgttatgaagccaggcgaagaagcgtatcgcgacattgtagctgcgttcggtccgggcattcttcgtgcggatggcgagatcgatcgccagaaactgggtgctatccgcttttcggacgaacaacaacgtaaggtgctgaattcgattgtaggtcctgcagtcctgaagaagatgctcgctgagaaagaagctcatatcaagtcaggcgccaagacggttgtgctggatatcccgctgctgttcgaatccggattgcaatcgtgggtcgacaaagttctcgtggtgtacgtcgatgatgatgttcagttacgccgccttatggcacgtaacgggtttactgaagaagaagctctgaagcgcattcgttcacagtggcccagtgcggagaaagttaaacgtgcagacgctgtcatcgacaataatggcaatattgaagaaacccgccgccagctgctggacattttacaccagtgggatctgctggacaagggtggctccggccaccatcatcaccatcactaatga

SEQ ID NO: 4164 - protein, 211 aa, synthetic construct
  REGION 1..211: note = Variant of 3'O-kinase
MAVTIGLTGGIADGKSTVSAMMRELGLPVIDADEAARAVMKPGEEAYRDIVAAFGPGILRADGEIDRQKLGAIRFSDEQQRKVLNSIVGPAVLKKMLAEKEAHIKSGAKTVVLDIPLLFESGLQSWVDKVLVVYVDDDVQLRRLMARNGFTEEEALKRIRSQWPSAEKVKRADAVIDNNGNIEETRRQLLDILHQWDLLDKGGSGHHHHHH

SEQ ID NO: 4165 - DNA, 639 bp, synthetic construct
  misc_feature 1..639: note = Variant of 3'O-kinase
  source 1..639: mol_type = other DNA
atggcggttaccattggtattacaggagggatcgcagcgggcaaatcgactgtgagtgccatgatgcgtgaactgggtctgccggtcatcgatgctgacgaggcagcacgcgccgttatgaagccaggcgaagaagcgtatcgcgacattgtagctgcgttcggtccgggcattcttcgtgcggatggcgagatcgatcgccagaaactgggtgctatccgcttttcggacgaacaacaacgtaaggtgctgggttcgattgtaggtcctgcagtcctgaagaagatggcggctgagaaagaagctcatatcaagtcaggcgccaagacggttgtgctggatatcccgctgctgttcgaatccggattgcaatcgatggtcgacaaagttctcgtggtgtacgtcgatgatgatgttcagttacgccgccttatggcacgtaacgggtttactgaagaagaagctctgaagcgcattcgttcacagtggcccagtgcggagaaagttaaacgtgcagacgctgtcatcgacaataatggcaatattgaagaaacccgccgccagctgctggacattttacaccagtgggatctgctggacaagggtggctccggccaccatcatcaccatcactaatga

SEQ ID NO: 4166 - protein, 211 aa, synthetic construct
  REGION 1..211: note = Variant of 3'O-kinase
MAVTIGITGGIAAGKSTVSAMMRELGLPVIDADEAARAVMKPGEEAYRDIVAAFGPGILRADGEIDRQKLGAIRFSDEQQRKVLGSIVGPAVLKKMAAEKEAHIKSGAKTVVLDIPLLFESGLQSMVDKVLVVYVDDDVQLRRLMARNGFTEEEALKRIRSQWPSAEKVKRADAVIDNNGNIEETRRQLLDILHQWDLLDKGGSGHHHHHH

SEQ ID NO: 4167 - DNA, 639 bp, synthetic construct
  misc_feature 1..639: note = Variant of 3'O-kinase
  source 1..639: mol_type = other DNA
atggcggttaccattggtttaacaggagggatcgcagcgggcaaatcgactgtgagtgccatgatgcgtgaactgggtctgccggtcatcgatgctgacgaggcagcacgcgccgttatgaagccaggcgaagaagcgtatcgcgacattgtagctgaattcggtccgggcacccttcgtgcggatggcgagatcgatcgccagaaactgggtgctatccgcttttcggacgaacaacaacgtaaggtgctgaattcgattgtaggtcctgcagtcctgaagaagatgctcgctgagcgtgaagctcatatcgggtcaggcgcctcgacggttgtgctggatatcccgctgctgttcgaatccggattgcaatcgtgggtcgacaaagttctcgtggtgtacgtcgatgatgatgttcagttacgccgccttatggcacgtaacgggtttactgaagaagaagctctgaagcgcattcgttcacagtggcccagtgcggagaaagttaaacgtgcagacgctgtcatcgacaataatggcaatattgaagaaacccgccgccagctgctggacattttacaccagtgggatctgctggacaagggtggctccggccaccatcatcaccatcactaatga

SEQ ID NO: 4168 - protein, 211 aa, synthetic construct
  REGION 1..211: note = Variant of 3'O-kinase
MAVTIGLTGGIAAGKSTVSAMMRELGLPVIDADEAARAVMKPGEEAYRDIVAEFGPGTLRADGEIDRQKLGAIRFSDEQQRKVLNSIVGPAVLKKMLAEREAHIGSGASTVVLDIPLLFESGLQSWVDKVLVVYVDDDVQLRRLMARNGFTEEEALKRIRSQWPSAEKVKRADAVIDNNGNIEETRRQLLDILHQWDLLDKGGSGHHHHHH

SEQ ID NO: 4169 - DNA, 639 bp, synthetic construct
  misc_feature 1..639: note = Variant of 3'O-kinase
  source 1..639: mol_type = other DNA
atggcggttaccattggtttaacaggagggatcgcagctggcaaatcgactgtgagtgccatgatgcgtgaactgggtctgccggtcatcgatgctgacgaggcagcacgcgccgttatgaagccaggcgaagaagcgtatcgcgacatggtagctgcgttcggtccgggcattcttcgtgcggatggcgagatcgatcgccagaaactgggtgctatccgcttttcggacgcacaacaacgtaaggtgctgaattcgattgtaggtcctgcagtcctgaagaagatgctcgctgagaaagaagctcatatcaagtcaggcgccaagacggttgtgctggatatcccgctgctgttcgaatccgggttgcaaagttgggtcgacaaagttctcgtggtgtacgtcgatgatgatgttcagttagaccgccttatggcacgtaacgggtttactgaagaagaagctctgaagcgcattcgttcacagtggcccagtgcggagaaagttaaacgtgcagacgctgtcatcgacaataatggcaatattgaagaaacccgccgccagctgctggatattttacaccagtgggatctgctggacaagggtggctccggccaccatcatcaccatcactaatga

SEQ ID NO: 4170 - protein, 211 aa, synthetic construct
  REGION 1..211: note = Variant of 3'O-kinase
MAVTIGLTGGIAAGKSTVSAMMRELGLPVIDADEAARAVMKPGEEAYRDMVAAFGPGILRADGEIDRQKLGAIRFSDAQQRKVLNSIVGPAVLKKMLAEKEAHIKSGAKTVVLDIPLLFESGLQSWVDKVLVVYVDDDVQLDRLMARNGFTEEEALKRIRSQWPSAEKVKRADAVIDNNGNIEETRRQLLDILHQWDLLDKGGSGHHHHHH

SEQ ID NO: 4171 - DNA, 639 bp, synthetic construct
  misc_feature 1..639: note = Variant of 3'O-kinase
  source 1..639: mol_type = other DNA
atggcggttaccattggtattacaggagggatcgcagcgggcaaatcgactgtgagtgccatgatgcgtgaactgggtctgccggtcatcgatgctgacgaggcagcacgcgccgttatgaagccaggcgaagaagcgtatcgcgacattgtagctgcgttcggtccgggcattcttcgtgcggatggcgagatcgatcgccagaaactgggtgctatccgcttttcggacgaacaacaacgtaaggtgctgaattcgattgtaggtcctgcagtcctgaagaagatgctcgctgagaaagaagctcatatcaagtcaggcgccaagacggttgtgctggatatcccgctgctgttcgaatccggattgcaatcgtgggtcgacaaagttctcgtggtgtacgtcgatgatgatgttcagttacgccgccttatggcacgtaacgggtttactgaagaagaagctctgaagcgcattcgttcacagtggcccagtgcggagaaagttaaacgtgcagacgctgtcatcgacaataatggcaatattgaagaaacccgccgccagctgctggacattttacaccagtgggatctgctggacaagggtggctccggccaccatcatcaccatcactaatga

SEQ ID NO: 4172 - protein, 211 aa, synthetic construct
  REGION 1..211: note = Variant of 3'O-kinase
MAVTIGITGGIAAGKSTVSAMMRELGLPVIDADEAARAVMKPGEEAYRDIVAAFGPGILRADGEIDRQKLGAIRFSDEQQRKVLNSIVGPAVLKKMLAEKEAHIKSGAKTVVLDIPLLFESGLQSWVDKVLVVYVDDDVQLRRLMARNGFTEEEALKRIRSQWPSAEKVKRADAVIDNNGNIEETRRQLLDILHQWDLLDKGGSGHHHHHH

SEQ ID NO: 4173 - DNA, 639 bp, synthetic construct
  misc_feature 1..639: note = Variant of 3'O-kinase
  source 1..639: mol_type = other DNA
atggcggttaccattggtttaacaggagggatcgcagcgggcaaatcgactgtgggcgccatgatgcgtgaactgggtctgccggtcatcgatgctgacgaggcagcacgcgccgttatgaagccaggcgaagaagcgtatcgcgacattgtagctgcgttcggtccgggcattcttcgtgcggatggcgagatcgatcgccagaaactgggtgctatccgcttttcggacgaacaacaacgtaaggtgctgaattcgattgtaggtcctgcagtcctgaagaagatgctcgctgagcgtgaagctcatatcctgtcaggcgccaagacggttgtgctggatatcccgctgctgttcgaatccggattgcaatcgtgggtcgacaaagttctcgtggtgtacgtcgatgatgatgttcagttacgccgccttatggcacgtaacgggtttactgaagaagaagctctgaagcgcattcgttcacagtggcccagtgcggagaaagttaaacgtgcagacgctgtcatcgacaataatggcaatattgaagaaacccgccgccagctgctggacattttacaccagtgggatctgctggaccacggtggctccggccaccatcatcaccatcactaatga

SEQ ID NO: 4174 - protein, 211 aa, synthetic construct
  REGION 1..211: note = Variant of 3'O-kinase
MAVTIGLTGGIAAGKSTVGAMMRELGLPVIDADEAARAVMKPGEEAYRDIVAAFGPGILRADGEIDRQKLGAIRFSDEQQRKVLNSIVGPAVLKKMLAEREAHILSGAKTVVLDIPLLFESGLQSWVDKVLVVYVDDDVQLRRLMARNGFTEEEALKRIRSQWPSAEKVKRADAVIDNNGNIEETRRQLLDILHQWDLLDHGGSGHHHHHH

SEQ ID NO: 4175 - DNA, 639 bp, synthetic construct
  misc_feature 1..639: note = Variant of 3'O-kinase
  source 1..639: mol_type = other DNA
atggcggttaccattggtttaacaggagggatcgcagcgggcaaatcgactgtgagcgccatgatgcgtgaactgggtctgccggtcatcgatgctgacgaggcagcacgcgccgttatgaagccaggcgaagaagcgtatcgcgacattgtagctgcgttcggtccgggcattcttcgtgcggatggcgagatcgatcgccagaaactgggtgctatccgcttttcggacgaacaacaacgtaaggtgctgaattcgattgtaggtcctgcagtcctgaagaagatgctcgctgagcgtgaagctcatatcaaatcaggcgccaagacggttgtgctggatatcccgctgctgttcgaatccggattgcaatcgtgggtcgacaaagttctcgtggtgtacgtcgatgatgatgttcagttacgccgccttatggcacgtaacgggtttactgaagaagaagctctgaagcgcattcgttcacagtggcccagtgcggagaaagttaaacgtgcagacgctgtcatcgacaataatggcaatattgaagaaacccgccgccagctgctggacattttacaccagtgggatctgctggacaagggtggctccggccaccatcatcaccatcactaatga

SEQ ID NO: 4176 - protein, 211 aa, synthetic construct
  REGION 1..211: note = Variant of 3'O-kinase
MAVTIGLTGGIAAGKSTVSAMMRELGLPVIDADEAARAVMKPGEEAYRDIVAAFGPGILRADGEIDRQKLGAIRFSDEQQRKVLNSIVGPAVLKKMLAEREAHIKSGAKTVVLDIPLLFESGLQSWVDKVLVVYVDDDVQLRRLMARNGFTEEEALKRIRSQWPSAEKVKRADAVIDNNGNIEETRRQLLDILHQWDLLDKGGSGHHHHHH

SEQ ID NO: 4177 - DNA, 639 bp, synthetic construct
  misc_feature 1..639: note = Variant of 3'O-kinase
  source 1..639: mol_type = other DNA
atggcggttaccattggtctgacaggagggatcgcagcgggcaaatcgactgtgagtgccatgatgcgtgaactgggtctgccggtcatcgatgctgacgaggcagcacgcgccgttatgaagccaggcgaagaagcgtatcgcgacattgtagctgcgttcggtccgggcattcttcgtgcggatggcgagatcgatcgccagaaactgggtgctatccgcttttcggacgaacaacaacgtaaggtgctgaattcgattgtaggtcctgcagtcctgaagaagatgctcgctgagaaagaagctcatatcaagtcaggcgccaagacggttgtgctggatatcccgctgctgttcgaatccggattgcaatcgatggtcgacaaagttctcgtggtgtacgtcgatgatgatgttcagttacgccgccttatggcacgtaacgggtttactgaagaagaagctctgaagcgcattcgttcacagtggcccagtgcggagaaagttaaacgtgcagacgctgtcatcgacaataatggcaatattgaagaaacccgccgccagctgctggacattttacaccagtgggatctgctggacaagggtggctccggccaccatcatcaccatcactaatga

SEQ ID NO: 4178 - protein, 211 aa, synthetic construct
  REGION 1..211: note = Variant of 3'O-kinase
MAVTIGLTGGIAAGKSTVSAMMRELGLPVIDADEAARAVMKPGEEAYRDIVAAFGPGILRADGEIDRQKLGAIRFSDEQQRKVLNSIVGPAVLKKMLAEKEAHIKSGAKTVVLDIPLLFESGLQSMVDKVLVVYVDDDVQLRRLMARNGFTEEEALKRIRSQWPSAEKVKRADAVIDNNGNIEETRRQLLDILHQWDLLDKGGSGHHHHHH

SEQ ID NO: 4179 - DNA, 639 bp, synthetic construct
  misc_feature 1..639: note = Variant of 3'O-kinase
  source 1..639: mol_type = other DNA
atggcggttaccattggtttaacaggagggatcgcagcgggcaaatcgactgtgggcgccatgatgcgtgaactgggtctgccggtcatcgatgctgacgaggcagcacgcgccgttatgaagccaggcgaagaagcgtatcgcgacattgtagctaacttcggtccgggcatccttcgtgcggatggcgagatcgatcgccagaaactgggtgctatccgcttttcggacgaacaacaacgtaaggtgctgaattcgattgtaggtcctgcagtcctgaagaagatgctcgctgagaaggaagctcatatcgggtcaggcgccaagacggttgtgctggatatcccgctgctgttcgaatccggattgcaatcgtgggtcgacaaagttctcgtggtgtacgtcgatgatgatgttcagttacgccgccttatggcacgtaacgggtttactgaagaagaagctctgaagcgcattcgttcacagtggcccagtgcggagaaagttaagcgtgcagacgctgtcatcgacaataatggcaatattgaagaaacccgccgccagctgctggacattttacaccagtgggatctgctggacaagggtggctccggccaccatcatcaccatcactaatga

SEQ ID NO: 4180 - protein, 211 aa, synthetic construct
  REGION 1..211: note = Variant of 3'O-kinase
MAVTIGLTGGIAAGKSTVGAMMRELGLPVIDADEAARAVMKPGEEAYRDIVANFGPGILRADGEIDRQKLGAIRFSDEQQRKVLNSIVGPAVLKKMLAEKEAHIGSGAKTVVLDIPLLFESGLQSWVDKVLVVYVDDDVQLRRLMARNGFTEEEALKRIRSQWPSAEKVKRADAVIDNNGNIEETRRQLLDILHQWDLLDKGGSGHHHHHH

SEQ ID NO: 4181 - DNA, 639 bp, synthetic construct
  misc_feature 1..639: note = Variant of 3'O-kinase
  source 1..639: mol_type = other DNA
atggcggttaccattggtttaacaggagggatcgcagcgggcaaatcgactgtgagtgccatgatgcgtgaactgggtctgccggtcatcgatgctgacgaggcagcacgcgccgttatgaagccaggcgaagaagcgtatcgcgacattgtagctaacttcggtccgggcacccttcgtgcggatggcgagatcgatcgccagaaactgggtgctatccgcttttcggacgaacaacaacgtaaggtgctgaattcgattgtaggtcctgcagtcctgaagaagatgctcgctgagaaggaagctcatatcaaatcaggcgcctcgacggttgtgctggatatcccgctgctgttcgaatccggattgcaatcgtgggtcgacaaagttctcgtggtgtacgtcgatgatgatgttcagttacgccgccttatggcacgtaacgggtttactgaagaagaagctctgaagcgcattcgttcacagtggcccagtgcggagaaagttaaacgtgcagacgctgtcatcgacaataatggcaatattgaagaaacccgccgccagctgctggacattttacaccagtgggatctgctggactcgggtggctccggccaccatcatcaccatcactaatga

SEQ ID NO: 4182 - protein, 211 aa, synthetic construct
  REGION 1..211: note = Variant of 3'O-kinase
MAVTIGLTGGIAAGKSTVSAMMRELGLPVIDADEAARAVMKPGEEAYRDIVANFGPGTLRADGEIDRQKLGAIRFSDEQQRKVLNSIVGPAVLKKMLAEKEAHIKSGASTVVLDIPLLFESGLQSWVDKVLVVYVDDDVQLRRLMARNGFTEEEALKRIRSQWPSAEKVKRADAVIDNNGNIEETRRQLLDILHQWDLLDSGGSGHHHHHH

SEQ ID NO: 4183 - DNA, 639 bp, synthetic construct
  misc_feature 1..639: note = Variant of 3'O-kinase
  source 1..639: mol_type = other DNA
atggcggttaccattggtttaacaggagggatcgcagcgggcaaatcgactgtgagtgccatgatgcgtgaactgggtctgccggtcatcgatgctgacgaggcagcacgcgccgttatgaagccaggcgaagaagcgtatcgcgacattgtagctgaattcggtccgggcatccttcgtgcggatggcgagatcgatcgccagaaactgggtgctatccgcttttcggacgaacaacaacgtaaggtgctgaattcgattgtaggtcctgcagtcctgaagaagatgctcgctgagtgggaagctcatatcgggtcaggcgccaagacggttgtgctggatatcccgctgctgttcgaatccggattgcaatcgtgggtcgacaaagttctcgtggtgtacgtcgatgatgatgttcagttacgccgccttatggcacgtaacgggtttactgaagaagaagctctgaagcgcattcgttcacagtggcccagtgcggagaaagttaaacgtgcagacgctgtcatcgacaataatggcaatattgaagaaacccgccgccagctgctggacattttacaccagtgggatctgctggacaagggtggctccggccaccatcatcaccatcactaatga

SEQ ID NO: 4184 - protein, 211 aa, synthetic construct
  REGION 1..211: note = Variant of 3'O-kinase
MAVTIGLTGGIAAGKSTVSAMMRELGLPVIDADEAARAVMKPGEEAYRDIVAEFGPGILRADGEIDRQKLGAIRFSDEQQRKVLNSIVGPAVLKKMLAEWEAHIGSGAKTVVLDIPLLFESGLQSWVDKVLVVYVDDDVQLRRLMARNGFTEEEALKRIRSQWPSAEKVKRADAVIDNNGNIEETRRQLLDILHQWDLLDKGGSGHHHHHH

SEQ ID NO: 4185 - DNA, 639 bp, synthetic construct
  misc_feature 1..639: note = Variant of 3'O-kinase
  source 1..639: mol_type = other DNA
atggcggttaccattggtttaacaggagggatcgcagctggcaaatcgactgtgagtgccatgatgcgtgaactgggtctgccggtcatcgatgctgacgaggcagcacgcgccgttatgaagccaggcgaagaagcgtatcgcgacattgtagctgcgttcggtccgggcattcttcgtgcggatggcgagatcgatcgccagaaactgggtgctatccgcttttcggacgaacaacaacgtaaggtgctgaattcgattgtaggtcctgcagtcctgaagaagatgctcgctgagaaagaagctcatatcaagtcaggcgccaagacggttgtgctggatatcccgctgctgttcgaatccgggttgcaaagttgggtcgacaaagttctcgtggtgtacgtcgatgatgatgttcagttacgccgccttatggcacgtaacgggtttactgaagaagaagctctgaagcgcattcgttcacagtggcccagtgcggagaaagttaaacgtgcagacgctgtcatcgacaataatggcaatattgaagaaacccgccgccagctgctggatattttacaccagtgggatctgctggacaagggtggcatgggccaccatcatcaccatcactaatga

SEQ ID NO: 4186 - protein, 211 aa, synthetic construct
  REGION 1..211: note = Variant of 3'O-kinase
MAVTIGLTGGIAAGKSTVSAMMRELGLPVIDADEAARAVMKPGEEAYRDIVAAFGPGILRADGEIDRQKLGAIRFSDEQQRKVLNSIVGPAVLKKMLAEKEAHIKSGAKTVVLDIPLLFESGLQSWVDKVLVVYVDDDVQLRRLMARNGFTEEEALKRIRSQWPSAEKVKRADAVIDNNGNIEETRRQLLDILHQWDLLDKGGMGHHHHHH

SEQ ID NO: 4187 - DNA, 639 bp, synthetic construct
  misc_feature 1..639: note = Variant of 3'O-kinase
  source 1..639: mol_type = other DNA
atggcggttaccattggtttaacaggagggatcgcagcgggcaaatcgactgtgagtgccatgatgcgtgaactgggtctgccggtcatcgatgctgacgaggcagcacgcgccgttatgaagccaggcgaagaagcgtatcgcgacattgtagctgcgttcggtccgggcattcttcgtgcagatggcgagatcgatcgccagaaactgggtgctatccgcttttcggacgaacaacaacgtaaggtgctgaattcgattgtaggtcctgcagtcctgaagaagatggcggctgagaaagaagctcatatcaagtcaggcgccaagacggttgtgctggatatcccgctgctgttcgaatccggattgcaatcgtgggtcgacaaagttctcgtggtgtacgtcgatgatgatgttcagttacgccgccttatggcacgtaacgggtttactgaagaagaagctctgaagcgcattcgttcacagtggcccagtgcggagaaagttaaacgtgcagacgctgtcatcgacaataatggcaatattgaagaaacccgccgccagctgctggacattttacaccagtgggatctgctggacaagggtggctccggccaccatcatcaccatcactaatga

SEQ ID NO: 4188 - protein, 211 aa, synthetic construct
  REGION 1..211: note = Variant of 3'O-kinase
MAVTIGLTGGIAAGKSTVSAMMRELGLPVIDADEAARAVMKPGEEAYRDIVAAFGPGILRADGEIDRQKLGAIRFSDEQQRKVLNSIVGPAVLKKMAAEKEAHIKSGAKTVVLDIPLLFESGLQSWVDKVLVVYVDDDVQLRRLMARNGFTEEEALKRIRSQWPSAEKVKRADAVIDNNGNIEETRRQLLDILHQWDLLDKGGSGHHHHHH

SEQ ID NO: 4189 - DNA, 639 bp, synthetic construct
  misc_feature 1..639: note = Variant of 3'O-kinase
  source 1..639: mol_type = other DNA
atggcggttaccattggtagtacaggagggatcgcagcgggcaaatcgactgtgagtgccatgatgcgtgaactgggtctgcctgtcatcgatgctgacgaggcagcacgcgccgttatgaagccaggcgaagaagcgtatcgcgacattgtagctgcgttcggtccgggcattcttcgtgaagatggcgagatcgatcgccagaaactgggtgctatccgcttttcggacgaacaacaacgtaaggtgctgcgttcgattgtaggtcctgcagtcctgaagaagatggcggctgagaaagaagctcatatcaagtcaggcgccaagacggttgtgctggatatcccgctgctgttcgaatccggattgcaatcgatggtcgacaaagttctcgtggtgtacgtcgatgatgatgttcagttacgccgccttatggcacgtaacgggtttactgaagaagaagctctgaagcgcattcgttcacagtggcccagtgcggagaaagttaaacgtgcagacgctgtcatcgacaataatggcaatattgaagaaacccgccgccagctgctggacattttacaccagtgggatctgctggacaagggtggcagcggccaccatcatcaccatcactaatga

SEQ ID NO: 4190 - protein, 211 aa, synthetic construct
  REGION 1..211: note = Variant of 3'O-kinase
MAVTIGSTGGIAAGKSTVSAMMRELGLPVIDADEAARAVMKPGEEAYRDIVAAFGPGILREDGEIDRQKLGAIRFSDEQQRKVLRSIVGPAVLKKMAAEKEAHIKSGAKTVVLDIPLLFESGLQSMVDKVLVVYVDDDVQLRRLMARNGFTEEEALKRIRSQWPSAEKVKRADAVIDNNGNIEETRRQLLDILHQWDLLDKGGSGHHHHHH

SEQ ID NO: 4191 - DNA, 639 bp, synthetic construct
  misc_feature 1..639: note = Variant of 3'O-kinase
  source 1..639: mol_type = other DNA
atggcggttaccattggtttaacaggagggatcgcagcgggcaaatcgactgtgagtgccatgatgcgtgaactgggtctgccggtcatcgatgctgacgaggcagctcgcgccgttatgaagccaggcgaagaagcgtatcgcgacattgtagctgcgttcggtccgggcattcttcgtgcggatggcgagatcgatcgccagaaactgggtgctatccgcttttcggacgaacaacaacgtaaggtgctgaattcgattgtaggtcctgcagtcctgaagaagatgctcgctgagaaagaagctcatatcaagtcaggcgccaagacggttgtgctggatatcccgctgctgttcgaatccggattgcaatcggctgtcgacaaagttctcgtggtgtacgtcgatgatgatgttcagttacgccgccttatggcacgtaacgggtttactgaagaagaagctctgaagcgcattcgttcacagtggcccagtgcggagaaagttaaacgtgcagacgctgtcatcgacaataatggcaatattgaagaaacccgccgccagctgctggacattttacaccagtgggatctgctggacaagggtggctccggccaccatcatcaccatcactaatga

SEQ ID NO: 4192 - protein, 211 aa, synthetic construct
  REGION 1..211: note = Variant of 3'O-kinase
MAVTIGLTGGIAAGKSTVSAMMRELGLPVIDADEAARAVMKPGEEAYRDIVAAFGPGILRADGEIDRQKLGAIRFSDEQQRKVLNSIVGPAVLKKMLAEKEAHIKSGAKTVVLDIPLLFESGLQSAVDKVLVVYVDDDVQLRRLMARNGFTEEEALKRIRSQWPSAEKVKRADAVIDNNGNIEETRRQLLDILHQWDLLDKGGSGHHHHHH

SEQ ID NO: 4193 - DNA, 639 bp, synthetic construct
  misc_feature 1..639: note = Variant of 3'O-kinase
  source 1..639: mol_type = other DNA
atggcggttaccattggtttaacaggagggatcgcagcgggcaaatcgactgtgggcgccatgatgcgtgaactgggtctgccggtcatcgatgctgacgaggcagcacgcgccgttatgaagccaggcgaagaagcgtatcgcgacattgtagctgcgttcggtccgggcattcttcgtgcggatggcgagatcgatcgccagaaactgggtgctatccgcttttcggacgaacaacaacgtaaggtgctgaattcgattgtaggtcctgcagtcctgaagaagatgctcgctgagaaagaagctcatatcaagtcaggcgccaagacggttgtgctggatatcccgctgctgttcgaatccggattgcaatcgtgggtcgacaaagttctcgtggtgtacgtcgatgatgatgttcagttacgccgccttatggcacgtaacgggtttactgaagaagaagctctgaagcgcattcgttcacagtggcccagtgcggagaaagttaaacgtgcagacgctgtcatcgacaataatggcaatattgaagaaacccgccgccagctgctggacattttacaccagtgggatctgctggacaagggtggctccggccaccatcatcaccatcactaatga

SEQ ID NO: 4194 - protein, 211 aa, synthetic construct
  REGION 1..211: note = Variant of 3'O-kinase
MAVTIGLTGGIAAGKSTVGAMMRELGLPVIDADEAARAVMKPGEEAYRDIVAAFGPGILRADGEIDRQKLGAIRFSDEQQRKVLNSIVGPAVLKKMLAEKEAHIKSGAKTVVLDIPLLFESGLQSWVDKVLVVYVDDDVQLRRLMARNGFTEEEALKRIRSQWPSAEKVKRADAVIDNNGNIEETRRQLLDILHQWDLLDKGGSGHHHHHH

SEQ ID NO: 4195 - DNA, 639 bp, synthetic construct
  misc_feature 1..639: note = Variant of 3'O-kinase
  source 1..639: mol_type = other DNA
atggcggttaccattggtttaacaggagggatcgcagcgggcaaatcgactgtgagtgccatgatgcgtgaactgggtctgcctgtcatcgattgggacgaggcagcacgcgccgttatgaagccaggcgaagaagcgtatcgcgacattgtagctgcgttcggtccgggcattcttcgtgcggatggcgagatcgatcgccagaaactgggtgctatccgcttttcggacgaacaacaacgtaaggtgctgcgttcgattgtaggtcctgcagtcctgaagaagatgctcgctgagaaagaagctcatatcaagtcaggcgccaagacggttgtgctggatatcccgctgctgttcgaatccggattgcaatcgggtgtcgacaaagttctcgtggtgtacgtcgatgatgatgttcagttacgccgccttatggcacgtaacgggtttactgaagaagaagctctgaagcgcattcgttcacagtggcccagtgcggagaaagttaaacgtgcagacgctgtcatcgacaataatggcaatattgaagaaacccgccgccagctgctggacattttacaccagtgggatctgctggacaagggtggctgcggccaccatcatcaccatcactaatga

SEQ ID NO: 4196 - protein, 211 aa, synthetic construct
  REGION 1..211: note = Variant of 3'O-kinase
MAVTIGLTGGIAAGKSTVSAMMRELGLPVIDWDEAARAVMKPGEEAYRDIVAAFGPGILRADGEIDRQKLGAIRFSDEQQRKVLRSIVGPAVLKKMLAEKEAHIKSGAKTVVLDIPLLFESGLQSGVDKVLVVYVDDDVQLRRLMARNGFTEEEALKRIRSQWPSAEKVKRADAVIDNNGNIEETRRQLLDILHQWDLLDKGGCGHHHHHH

SEQ ID NO: 4197 - DNA, 639 bp, synthetic construct
  misc_feature 1..639: note = Variant of 3'O-kinase
  source 1..639: mol_type = other DNA
atggcggttaccattggtttaacaggagggatcgcagcgggcaaatcgactgtgggcgccatgatgcgtgaactgggtctgccggtcatcgatgctgacgaggcagcacgcgccgttatgaagccaggcgaagaagcgtatcgcgacattgtagctaacttcggtccgggcatccttcgtgcggatggcgagatcgatcgccagaaactgggtgctatccgcttttcggacgaacaacaacgtaaggtgctgaattcgattgtaggtcctgcagtcctgaagaagatgctcgctgagaaggaagctcatatcaaatcaggcgccaagacggttgtgctggatatcccgctgctgttcgaatccggattgcaatcgtgggtcgacaaagttctcgtggtgtacgtcgatgatgatgttcagttacgccgccttatggcacgtaacgggtttactgaagaagaagctctgaagcgcattcgttcacagtggcccagtgcggagaaagttaaacgtgcagacgctgtcatcgacaataatggcaatattgaagaaacccgccgccagctgctggacattttacaccagtgggatctgctggaccacggtggctccggccaccatcatcaccatcactaatga

SEQ ID NO: 4198 - protein, 211 aa, synthetic construct
  REGION 1..211: note = Variant of 3'O-kinase
MAVTIGLTGGIAAGKSTVGAMMRELGLPVIDADEAARAVMKPGEEAYRDIVANFGPGILRADGEIDRQKLGAIRFSDEQQRKVLNSIVGPAVLKKMLAEKEAHIKSGAKTVVLDIPLLFESGLQSWVDKVLVVYVDDDVQLRRLMARNGFTEEEALKRIRSQWPSAEKVKRADAVIDNNGNIEETRRQLLDILHQWDLLDHGGSGHHHHHH

SEQ ID NO: 4199 - DNA, 639 bp, synthetic construct
  misc_feature 1..639: note = Variant of 3'O-kinase
  source 1..639: mol_type = other DNA
atggcggttaccattggtttaacaggagggatcgcagcgggcaaatcgactgtgagtgccatgatgcgtgaactgggtctgccggtcatcgatgctgacgaggcagcacgcgccgttatgaagccaggcgaagaagcgtatcgcgacattgtagctgcgttcggtccgggcattcttcgtgcggatggcgagatcgatcgccagaaactgggtgctatccgcttttcggacgaaggccaacgtaaggtgctgaattcgattgtaggtcctgcagtcctgaagaagatgctcgctgagaaagaagctcatatcaagtcaggcgccaagacggttgtgctggatatcccgctgctgttcgaatccggattgcaatcgtgggtcgacaaagttctcgtggtgtacgtcgatgatgatgttcagttacgccgccttatggcacgtaacgggtttactgaagaagaagctctgaagcgcattcgttcacagtggcccagtgcggagaaagttaaacgtgcagacgctgtcatcgacaataatggcaatattgaagaaacccgccgccagctgctggacattttacaccagtgggatctgctggacaagggtggctccggccaccatcatcaccatcactaatga

SEQ ID NO: 4200 - protein, 211 aa, synthetic construct
  REGION 1..211: note = Variant of 3'O-kinase
MAVTIGLTGGIAAGKSTVSAMMRELGLPVIDADEAARAVMKPGEEAYRDIVAAFGPGILRADGEIDRQKLGAIRFSDEGQRKVLNSIVGPAVLKKMLAEKEAHIKSGAKTVVLDIPLLFESGLQSWVDKVLVVYVDDDVQLRRLMARNGFTEEEALKRIRSQWPSAEKVKRADAVIDNNGNIEETRRQLLDILHQWDLLDKGGSGHHHHHH

SEQ ID NO: 4201 - DNA, 639 bp, synthetic construct
  misc_feature 1..639: note = Variant of 3'O-kinase
  source 1..639: mol_type = other DNA
atggcggttaccattggtctgacaggagggatcgcagcgggcaaatcgactgtgagtgccatgatgcgtgaactgggtctgccggtcatcgatgctgacgaggcacgccgcgccgttatgaagccaggcgaagaagcgtatcgcgacattgtagctgcgttcggtccgggcattcttcgtgaagatggcgagatcgatcgccagaaactgggtgctatccgcttttcggacgaacaacaacgtaaggtgctgaattcgattgtaggtcctgcagtcctgaagaagatgctggctgagaaagaagctcatatcaagtcaggcgccaagacggttgtgctggatatcccgctgctgttcgaatccggattgcaatcgatggtcgacaaagttctcgtggtgtacgtcgatgatgatgttcagttacgccgccttatggcacgtaacgggtttactgaagaagaagctctgaagcgcattcgttcacagtggcccagtgcggagaaagttaaacgtgcagacgctgtcatcgacaataatggcaatattgaagaaacccgccgccagctgctggacattttacaccagtgggatctgctggacaagggtggctgcggccaccatcatcaccatcactaatga

SEQ ID NO: 4202 - protein, 211 aa, synthetic construct
  REGION 1..211: note = Variant of 3'O-kinase
MAVTIGLTGGIAAGKSTVSAMMRELGLPVIDADEARRAVMKPGEEAYRDIVAAFGPGILREDGEIDRQKLGAIRFSDEQQRKVLNSIVGPAVLKKMLAEKEAHIKSGAKTVVLDIPLLFESGLQSMVDKVLVVYVDDDVQLRRLMARNGFTEEEALKRIRSQWPSAEKVKRADAVIDNNGNIEETRRQLLDILHQWDLLDKGGCGHHHHHH

SEQ ID NO: 4203 - DNA, 639 bp, synthetic construct
  misc_feature 1..639: note = Variant of 3'O-kinase
  source 1..639: mol_type = other DNA
atggcggttaccattggtttaacaggagggatcgcagcgggcaaatcgactgtgagtgccatgatgcgtgaactgggtctgactgtcatcgattgggacgaggcagctcgcgccgttatgaagccaggcgaagaagcgtatcgcgacattgtagctgcgttcggtccgggcattcttcgtgcggatggcgagatcgatcgccagaaactgggtgctatccgcttttcggacgaacaacaacgtaaggtgctgcgttcgattgtaggtcctgcagtcctgaagaagatgctcgctgagaaagaagctcatatcaagtcaggcgccaagacggttgtgctggatatcccgctgctgttcgaatccggattgcaatcgtgggtcgacaaagttctcgtggtgtacgtcgatgatgatgttcagttacgccgccttatggcacgtaacgggtttactgaagaagaagctctgaagcgcattcgttcacagtggcccagtgcggagaaagttaaacgtgcagacgctgtcatcgacaataatggcaatattgaagaaacccgccgccagctgctggacattttacaccagtgggatctgctggacaagggtggctccggccaccatcatcaccatcactaatga

SEQ ID NO: 4204 - protein, 211 aa, synthetic construct
  REGION 1..211: note = Variant of 3'O-kinase
MAVTIGLTGGIAAGKSTVSAMMRELGLTVIDWDEAARAVMKPGEEAYRDIVAAFGPGILRADGEIDRQKLGAIRFSDEQQRKVLRSIVGPAVLKKMLAEKEAHIKSGAKTVVLDIPLLFESGLQSWVDKVLVVYVDDDVQLRRLMARNGFTEEEALKRIRSQWPSAEKVKRADAVIDNNGNIEETRRQLLDILHQWDLLDKGGSGHHHHHH

SEQ ID NO: 4205 - DNA, 639 bp, synthetic construct
  misc_feature 1..639: note = Variant of 3'O-kinase
  source 1..639: mol_type = other DNA
atggcggttaccattggtttaacaggagggatcgcagcgggcaaatcgactgtgagtgccatgatgcgtgaactgggtctgcctgtcatcgattgggacgaggcaggccgcgccgttatgaagccaggcgaagaagcgtatcgcgacattgtagctgcgttcggtccgggcattcttcgtgcggatggcgagatcgatcgccagaaactgggtgctatccgcttttcggacgaacaacaacgtaaggtgctgaattcgattgtaggtcctgcagtcctgaagaagatgctcgctgagaaagaagctcatatcaagtcaggcgccaagacggttgtgctggatatcccgctgctgttcgaatccggattgcaatcgatggtcgacaaagttctcgtggtgtacgtcgatgatgatgttcagttacgccgccttatggcacgtaacgggtttactgaagaagaagctctgaagcgcattcgttcacagtggcccagtgcggagaaagttaaacgtgcagacgctgtcatcgacaataatggcaatattgaagaaacccgccgccagctgctggacattttacaccagtgggatctgctggacaagggtggctccggccaccatcatcaccatcactaatga

SEQ ID NO: 4206 - protein, 211 aa, synthetic construct
  REGION 1..211: note = Variant of 3'O-kinase
MAVTIGLTGGIAAGKSTVSAMMRELGLPVIDWDEAGRAVMKPGEEAYRDIVAAFGPGILRADGEIDRQKLGAIRFSDEQQRKVLNSIVGPAVLKKMLAEKEAHIKSGAKTVVLDIPLLFESGLQSMVDKVLVVYVDDDVQLRRLMARNGFTEEEALKRIRSQWPSAEKVKRADAVIDNNGNIEETRRQLLDILHQWDLLDKGGSGHHHHHH

SEQ ID NO: 4207 - DNA, 639 bp, synthetic construct
  misc_feature 1..639: note = Variant of 3'O-kinase
  source 1..639: mol_type = other DNA
atggcggttaccattggtttaacaggagggatcgcagcgggcaaatcgactgtgagtgccatgatgcgtgaactgggtctgactgtcatcgatgctgacgaggcacgccgcgccgttatgaagccaggcgaagaagcgtatcgcgacattgtagctgcgttcggtccgggcattcttcgtgaagatggcgagatcgatcgccagaaactgggtgctatccgcttttcggacgaacaacaacgtaaggtgctgaattcgattgtaggtcctgcagtcctgaagaagatgctcgctgagaaagaagctcatatcaagtcaggcgccaagacggttgtgctggatatcccgctgctgttcgaatccggattgcaatcgtgggtcgacaaagttctcgtggtgtacgtcgatgatgatgttcagttacgccgccttatggcacgtaacgggtttactgaagaagaagctctgaagcgcattcgttcacagtggcccagtgcggagaaagttaaacgtgcagacgctgtcatcgacaataatggcaatattgaagaaacccgccgccagctgctggacattttacaccagtgggatctgctggacaagggtggctccggccaccatcatcaccatcactaatga

SEQ ID NO: 4208 - protein, 211 aa, synthetic construct
  REGION 1..211: note = Variant of 3'O-kinase
MAVTIGLTGGIAAGKSTVSAMMRELGLTVIDADEARRAVMKPGEEAYRDIVAAFGPGILREDGEIDRQKLGAIRFSDEQQRKVLNSIVGPAVLKKMLAEKEAHIKSGAKTVVLDIPLLFESGLQSWVDKVLVVYVDDDVQLRRLMARNGFTEEEALKRIRSQWPSAEKVKRADAVIDNNGNIEETRRQLLDILHQWDLLDKGGSGHHHHHH

SEQ ID NO: 4209 - DNA, 639 bp, synthetic construct
  misc_feature 1..639: note = Variant of 3'O-kinase
  source 1..639: mol_type = other DNA
atggcggttaccattggtttaacaggagggatcgcagcgggcaaatcgactgtgagtgccatgatgcgtgaactgggtctgactgtcatcgattgggacgaggcagctcgcgccgttatgaagccaggcgaagaagcgtatcgcgacattgtagctgcgttcggtccgggcattcttcgtgcggatggcgagatcgatcgccagaaactgggtgctatccgcttttcggacgaacaacaacgtaaggtgctgaattcgattgtaggtcctgcagtcctgaagaagatggcggctgagaaagaagctcatatcaagtcaggcgccaagacggttgtgctggatatcccgctgctgttcgaatccggattgcaatcgatggtcgacaaagttctcgtggtgtacgtcgatgatgatgttcagttacgccgccttatggcacgtaacgggtttactgaagaagaagctctgaagcgcattcgttcacagtggcccagtgcggagaaagttaaacgtgcagacgctgtcatcgacaataatggcaatattgaagaaacccgccgccagctgctggacattttacaccagtgggatctgctggacaagggtggctccggccaccatcatcaccatcactaatga

SEQ ID NO: 4210 - protein, 211 aa, synthetic construct
  REGION 1..211: note = Variant of 3'O-kinase
MAVTIGLTGGIAAGKSTVSAMMRELGLTVIDWDEAARAVMKPGEEAYRDIVAAFGPGILRADGEIDRQKLGAIRFSDEQQRKVLNSIVGPAVLKKMAAEKEAHIKSGAKTVVLDIPLLFESGLQSMVDKVLVVYVDDDVQLRRLMARNGFTEEEALKRIRSQWPSAEKVKRADAVIDNNGNIEETRRQLLDILHQWDLLDKGGSGHHHHHH

SEQ ID NO: 4211 - DNA, 639 bp, synthetic construct
  misc_feature 1..639: note = Variant of 3'O-kinase
  source 1..639: mol_type = other DNA
atggcggttaccattggtctgacaggagggatcgcagcgggcaaatcgactgtgagtgccatgatgcgtgaactgggtctgcctgtcatcgattgggacgaggcaggccgcgccgttatgaagccaggcgaagaagcgtatcgcgacattgtagctgcgttcggtccgggcattcttcgtgaagatggcgagatcgatcgccagaaactgggtgctatccgcttttcggacgaacaacaacgtaaggtgctgggttcgattgtaggtcctgcagtcctgaagaagatgaacgctgagaaagaagctcatatcaagtcaggcgccaagacggttgtgctggatatcccgctgctgttcgaatccggattgcaatcgatggtcgacaaagttctcgtggtgtacgtcgatgatgatgttcagttacgccgccttatggcacgtaacgggtttactgaagaagaagctctgaagcgcattcgttcacagtggcccagtgcggagaaagttaaacgtgcagacgctgtcatcgacaataatggcaatattgaagaaacccgccgccagctgctggacattttacaccagtgggatctgctggacaagggtggctgcggccaccatcatcaccatcactaatga

SEQ ID NO: 4212 - protein, 211 aa, synthetic construct
  REGION 1..211: note = Variant of 3'O-kinase
MAVTIGLTGGIAAGKSTVSAMMRELGLPVIDWDEAGRAVMKPGEEAYRDIVAAFGPGILREDGEIDRQKLGAIRFSDEQQRKVLGSIVGPAVLKKMNAEKEAHIKSGAKTVVLDIPLLFESGLQSMVDKVLVVYVDDDVQLRRLMARNGFTEEEALKRIRSQWPSAEKVKRADAVIDNNGNIEETRRQLLDILHQWDLLDKGGCGHHHHHH

SEQ ID NO: 4213 - DNA, 639 bp, synthetic construct
  misc_feature 1..639: note = Variant of 3'O-kinase
  source 1..639: mol_type = other DNA
atggcggttaccattggtttaacaggagggatcgcagcgggcaaatcgactgtgagtgccatgatgcgtgaactgggtctgccggtcatcgatgctgacgaggcagcacgcgccgttatgaagccaggcgaagaagcgtatcgcgacattgtagctgcgttcggtccgggcatccttcgtgcggatggcgagatcgatcgccagaaactgggtgctatccgcttttcggacgaacaacaacgtaaggtgctgaattcgattgtaggtcctgcagtcctgaagaagatgctcgctgagtgggaagctcatatcgcgtcaggcgccaagacggttgtgctggatatcccgctgctgttcgaatccggattgcaatcgtgggtcgacaaagttctcgtggtgtacgtcgatgatgatgttcagttacgccgccttatggcacgtaacgggtttactgaagaagaagctctgaagcgcattcgttcacagtggcccagtgcggagaaagttaaacgtgcagacgctgtcatcgacaataatggcaatattgaagaaacccgccgccagctgctggacattttacaccagtgggatctgctggacaagggtggctccggccaccatcatcaccatcactaatga

SEQ ID NO: 4214 - protein, 211 aa, synthetic construct
  REGION 1..211: note = Variant of 3'O-kinase
MAVTIGLTGGIAAGKSTVSAMMRELGLPVIDADEAARAVMKPGEEAYRDIVAAFGPGILRADGEIDRQKLGAIRFSDEQQRKVLNSIVGPAVLKKMLAEWEAHIASGAKTVVLDIPLLFESGLQSWVDKVLVVYVDDDVQLRRLMARNGFTEEEALKRIRSQWPSAEKVKRADAVIDNNGNIEETRRQLLDILHQWDLLDKGGSGHHHHHH

SEQ ID NO: 4215 - DNA, 639 bp, synthetic construct
  misc_feature 1..639: note = Variant of 3'O-kinase
  source 1..639: mol_type = other DNA
atggcggttaccattggtttaacaggagggatcgcagcgggcaaatcgactgtgagtgccatgatgcgtgaactgggtctgactgtcatcgattgggacgaggcagctcgcgccgttatgaagccaggcgaagaagcgtatcgcgacattgtagctgcgttcggtccgggcattcttcgtgaagatggcgagatcgatcgccagaaactgggtgctatccgcttttcggacgaacaacaacgtaaggtgctgaattcgattgtaggtcctgcagtcctgaagaagatgctcgctgagaaagaagctcatatcaagtcaggcgccaagacggttgtgctggatatcccgctgctgttcgaatccggattgcaatcgtgggtcgacaaagttctcgtggtgtacgtcgatgatgatgttcagttacgccgccttatggcacgtaacgggtttactgaagaagaagctctgaagcgcattcgttcacagtggcccagtgcggagaaagttaaacgtgcagacgctgtcatcgacaataatggcaatattgaagaaacccgccgccagctgctggacattttacaccagtgggatctgctggacaagggtggcagcggccaccatcatcaccatcactaatga

SEQ ID NO: 4216 - protein, 211 aa, synthetic construct
  REGION 1..211: note = Variant of 3'O-kinase
MAVTIGLTGGIAAGKSTVSAMMRELGLTVIDWDEAARAVMKPGEEAYRDIVAAFGPGILREDGEIDRQKLGAIRFSDEQQRKVLNSIVGPAVLKKMLAEKEAHIKSGAKTVVLDIPLLFESGLQSWVDKVLVVYVDDDVQLRRLMARNGFTEEEALKRIRSQWPSAEKVKRADAVIDNNGNIEETRRQLLDILHQWDLLDKGGSGHHHHHH

SEQ ID NO: 4217 - DNA, 639 bp, synthetic construct
  misc_feature 1..639: note = Variant of 3'O-kinase
  source 1..639: mol_type = other DNA
atggcggttaccattggtttaacaggagggatcgcagcgggcaaatcgactgtgagtgccatgatgcgtgaactgggtctgccggtcatcgatgctgacgaggcagcacgcgccgttatgaagccaggcgaagaagcgtatcgcgacattgtagctgcgttcggtccgggcattcttcgtgcggatggcgagatcgatcgccagaaactgggtgctatccgcttttcggacgaacaacaacgtaaggtgctgcgttcgattgtaggtcctgcagtcctgaagaagatgctggctgagaaagaagctcatatcaagtcaggcgccaagacggttgtgctggatatcccgctgctgttcgaatccggattgcaatcgatggtcgacaaagttctcgtggtgtacgtcgatgatgatgttcagttacgccgccttatggcacgtaacgggtttactgaagaagaagctctgaagcgcattcgttcacagtggcccagtgcggagaaagttaaacgtgcagacgctgtcatcgacaataatggcaatattgaagaaacccgccgccagctgctggacattttacaccagtgggatctgctggacaagggtggctccggccaccatcatcaccatcactaatga

SEQ ID NO: 4218 - protein, 211 aa, synthetic construct
  REGION 1..211: note = Variant of 3'O-kinase
MAVTIGLTGGIAAGKSTVSAMMRELGLPVIDADEAARAVMKPGEEAYRDIVAAFGPGILRADGEIDRQKLGAIRFSDEQQRKVLRSIVGPAVLKKMLAEKEAHIKSGAKTVVLDIPLLFESGLQSMVDKVLVVYVDDDVQLRRLMARNGFTEEEALKRIRSQWPSAEKVKRADAVIDNNGNIEETRRQLLDILHQWDLLDKGGSGHHHHHH

SEQ ID NO: 4219 - DNA, 639 bp, synthetic construct
  misc_feature 1..639: note = Variant of 3'O-kinase
  source 1..639: mol_type = other DNA
atggcggttaccattggtttaacaggagggatcgcagcgggcaaatcgactgtgagtgccatgatgcgtgaactgggtctgactgtcatcgattgggacgaggcagctcgcgccgttatgaagccaggcgaagaagcgtatcgcgacattgtagctgcgttcggtccgggcattcttcgtgcggatggcgagatcgatcgccagaaactggttgctatccgcttttcggacgaaggccaacgtaaggtgctgaattcgattgtaggtcctgcagtcctgaagaagatggcggctgagaaagaagctcatatcaagtcaggcgccaagacggttgtgctggatatcccgctgctgttcgaatccggattgcaatcgatggtcgacaaagttctcgtggtgtacgtcgatgatgatgttcagttacgccgccttatggcacgtaacgggtttactgaagaagaagctctgaagcgcattcgttcacagtggcccagtgcggagaaagttaaacgtgcagacgctgtcatcgacaataatggcaatattgaagaaacccgccgccagctgctggacattttacaccagtgggatctgctggacaagggtggctgcggccaccatcatcaccatcactaatga

SEQ ID NO: 4220 - protein, 211 aa, synthetic construct
  REGION 1..211: note = Variant of 3'O-kinase
MAVTIGLTGGIAAGKSTVSAMMRELGLTVIDWDEAARAVMKPGEEAYRDIVAAFGPGILRADGEIDRQKLVAIRFSDEGQRKVLNSIVGPAVLKKMAAEKEAHIKSGAKTVVLDIPLLFESGLQSMVDKVLVVYVDDDVQLRRLMARNGFTEEEALKRIRSQWPSAEKVKRADAVIDNNGNIEETRRQLLDILHQWDLLDKGGCGHHHHHH

SEQ ID NO: 4221 - DNA, 639 bp, synthetic construct
  misc_feature 1..639: note = Variant of 3'O-kinase
  source 1..639: mol_type = other DNA
atggcggttaccattggtttaacaggagggatcgcagcgggcaaatcgactgtgagtgccatgatgcgtgaactgggtctgccggtcatcgatgctgacgaggcagcacgcgccgttatgaagccaggcgaagaagcgtatcgcgacattgtagctgcgttcggtccgggcattcttcgtgcggatggcgagatcgatcgccagaaactgggtgctatccgcttttcggacgaacaacaacgtaaggtgctgaattcgattgtaggtcctgcagtcctgaagaagatgctcgctgagtgggaagctcatatcgggtcaggcgccaagacggttgtgctggatatcccgctgctgttcgaatccggattgcaatcgtgggtcgacaaagttctcgtggtgtacgtcgatgatgatgttcagttacgccgccttatggcacgtaacgggtttactgaagaagaagctctgaagcgcattcgttcacagtggcccagtgcggagaaagttaagcgtgcagacgctgtcatcgacaataatggcaatattgaagaaacccgccgccagctgctggacattttacaccagtgggatctgctggacaagggtggctccggccaccatcatcaccatcactaatga

SEQ ID NO: 4222 - protein, 211 aa, synthetic construct
  REGION 1..211: note = Variant of 3'O-kinase
MAVTIGLTGGIAAGKSTVSAMMRELGLPVIDADEAARAVMKPGEEAYRDIVAAFGPGILRADGEIDRQKLGAIRFSDEQQRKVLNSIVGPAVLKKMLAEWEAHIGSGAKTVVLDIPLLFESGLQSWVDKVLVVYVDDDVQLRRLMARNGFTEEEALKRIRSQWPSAEKVKRADAVIDNNGNIEETRRQLLDILHQWDLLDKGGSGHHHHHH

SEQ ID NO: 4223 - DNA, 639 bp, synthetic construct
  misc_feature 1..639: note = Variant of 3'O-kinase
  source 1..639: mol_type = other DNA
atggcggttaccattggtattacaggagggatcgcagcgggcaaatcgactgtgagtgccatgatgcgtgaactgggtctgactgtcatcgattgggacgaggcagctcgcgccgttatgaagccaggcgaagaagcgtatcgcgacattgtagctgcgttcggtccgggcattcttcgtgcggatggcgagatcgatcgccagaaactgggtgctatccgcttttcggacgaacaacaacgtaaggtgctgaattcgattgtaggtcctgcagtcctgaagaagatgaacgctgagaaagaagctcatatcaagtcaggcgccaagacggttgtgctggatatcccgctgctgttcgaatccggattgcaatcgtgggtcgacaaagttctcgtggtgtacgtcgatgatgatgttcagttacgccgccttatggcacgtaacgggtttactgaagaagaagctctgaagcgcattcgttcacagtggcccagtgcggagaaagttaaacgtgcagacgctgtcatcgacaataatggcaatattgaagaaacccgccgccagctgctggacattttacaccagtgggatctgctggacaagggtggcagcggccaccatcatcaccatcactaatga

SEQ ID NO: 4224 - protein, 211 aa, synthetic construct
  REGION 1..211: note = Variant of 3'O-kinase
MAVTIGITGGIAAGKSTVSAMMRELGLTVIDWDEAARAVMKPGEEAYRDIVAAFGPGILRADGEIDRQKLGAIRFSDEQQRKVLNSIVGPAVLKKMNAEKEAHIKSGAKTVVLDIPLLFESGLQSWVDKVLVVYVDDDVQLRRLMARNGFTEEEALKRIRSQWPSAEKVKRADAVIDNNGNIEETRRQLLDILHQWDLLDKGGSGHHHHHH

SEQ ID NO: 4225 - DNA, 639 bp, synthetic construct
  misc_feature 1..639: note = Variant of 3'O-kinase
  source 1..639: mol_type = other DNA
atggcggttaccattggtattacaggagggatcgcagcgggcaaatcgactgtgagtgccatgatgcgtgaactgggtctgccggtcatcgatgctgacgaggcagcacgcgccgttatgaagccaggcgaagaagcgtatcgcgacattgtagctgcgttcggtccgggcattcttcgtgaagatggcgagatcgatcgccagaaactgggtgctatccgcttttcggacgaacaacaacgtaaggtgctgaattcgattgtaggtcctgcagtcctgaagaagatgctggctgagaaagaagctcatatcaagtcaggcgccaagacggttgtgctggatatcccgctgctgttcgaatccggattgcaatcgtgggtcgacaaagttctcgtggtgtacgtcgatgatgatgttcagttacgccgccttatggcacgtaacgggtttactgaagaagaagctctgaagcgcattcgttcacagtggcccagtgcggagaaagttaaacgtgcagacgctgtcatcgacaataatggcaatattgaagaaacccgccgccagctgctggacattttacaccagtgggatctgctggacaagggtggctccggccaccatcatcaccatcactaatga

SEQ ID NO: 4226 - protein, 211 aa, synthetic construct
  REGION 1..211: note = Variant of 3'O-kinase
MAVTIGITGGIAAGKSTVSAMMRELGLPVIDADEAARAVMKPGEEAYRDIVAAFGPGILREDGEIDRQKLGAIRFSDEQQRKVLNSIVGPAVLKKMLAEKEAHIKSGAKTVVLDIPLLFESGLQSWVDKVLVVYVDDDVQLRRLMARNGFTEEEALKRIRSQWPSAEKVKRADAVIDNNGNIEETRRQLLDILHQWDLLDKGGSGHHHHHH

SEQ ID NO: 4227 - DNA, 639 bp, synthetic construct
  misc_feature 1..639: note = Variant of 3'O-kinase
  source 1..639: mol_type = other DNA
atggcggttaccattggtttaacaggagggatcgcagcgggcaaatcgactgtgagtgccatgatgcgtgaactgggtctgccggtcatcgatgctgacgaggcagcacgcgccgttatgaagccaggcgaagaagcgtatcgcgacattgtagctgcgttcggtccgggcattcttcgtgcggatggcgagatcgatcgccagaaactgggtgctatctttttttcggacgaacaacaacgtaaggtgctgaattcgattgtaggtcctgcagtcctgaagaagatgctcgctgagaaagaagctcatatcaagtcaggcgccaagacggttgtgctggatatcccgctgctgttcgaatccggattgcaatcgtgggtcgacaaagttctcgtggtgtacgtcgatgatgatgttcagttacgccgccttatggcacgtaacgggtttactgaagaagaagctctgaagcgcattcgttcacagtggcccagtgcggagaaagttaaacgtgcagacgctgtcatcgacaataatggcaatattgaagaaacccgccgccagctgctggacattttacaccagtgggatctgctggacaagggtggctccggccaccatcatcaccatcactaatga

SEQ ID NO: 4228 - protein, 211 aa, synthetic construct
  REGION 1..211: note = Variant of 3'O-kinase
MAVTIGLTGGIAAGKSTVSAMMRELGLPVIDADEAARAVMKPGEEAYRDIVAAFGPGILRADGEIDRQKLGAIFFSDEQQRKVLNSIVGPAVLKKMLAEKEAHIKSGAKTVVLDIPLLFESGLQSWVDKVLVVYVDDDVQLRRLMARNGFTEEEALKRIRSQWPSAEKVKRADAVIDNNGNIEETRRQLLDILHQWDLLDKGGSGHHHHHH

SEQ ID NO: 4229 - DNA, 639 bp, synthetic construct
  misc_feature 1..639: note = Variant of 3'O-kinase
  source 1..639: mol_type = other DNA
atggcggttaccattggtttaacaggagggatcgcagcgggcaaatcgactgtgagtgccatgatgcgtgaactgggtctgccggtcatcgatgctgacgaggcagcacgcgccgttatgaagccaggcgaagaagcgtatcgcgacattgtagctgcgttcggtccgggcattcttcgtgcggatggcgagatcgatcgccagaaactggctgctatccgcttttcggacgaacaacaacgtaaggtgctgaattcgattgtaggtcctgcagtcctgaagaagatgctcgctgagaaagaagctcatatcaagtcaggcgccaagacggttgtgctggatatcccgctgctgttcgaatccggattgcaatcgtgggtcgacaaagttctcgtggtgtacgtcgatgatgatgttcagttacgccgccttatggcacgtaacgggtttactgaagaagaagctctgaagcgcattcgttcacagtggcccagtgcggagaaagttaaacgtgcagacgctgtcatcgacaataatggcaatattgaagaaacccgccgccagctgctggacattttacaccagtgggatctgctggacaagggtggctccggccaccatcatcaccatcactaatga

SEQ ID NO: 4230 - protein, 211 aa, synthetic construct
  REGION 1..211: note = Variant of 3'O-kinase
MAVTIGLTGGIAAGKSTVSAMMRELGLPVIDADEAARAVMKPGEEAYRDIVAAFGPGILRADGEIDRQKLAAIRFSDEQQRKVLNSIVGPAVLKKMLAEKEAHIKSGAKTVVLDIPLLFESGLQSWVDKVLVVYVDDDVQLRRLMARNGFTEEEALKRIRSQWPSAEKVKRADAVIDNNGNIEETRRQLLDILHQWDLLDKGGSGHHHHHH

SEQ ID NO: 4231 - DNA, 639 bp, synthetic construct
  misc_feature 1..639: note = Variant of 3'O-kinase
  source 1..639: mol_type = other DNA
atggcggttaccattggtttaacaggagggatcgcagcgggcaaatcgactgtgagtgccatgatgcgtgaactgggtctgccggtcatcgatgctgacgaggcagcacgcgccgttatgaagccaggcgaagaagcgtatcgcgacattgtagctgcgttcggtccgggcattcttcgtgcggatggcgagatcgatcgccagaaactgggtgctatccgcttttcggacgaacaacaacgtaaggtgctgaattcgattgtaggtcctgcagtcctgaagaagatgctcgctgagaaagaagctcatatcaagtcaggcgccaagacggttgtgctggatatcccgctgctgttcgaatccggattgcaatcgtgggtcgacaaagttctcgtggtgtacgtcgatgatgatgttcagttacgccgccttatggatcgtaacgggtttactgaagaagaagctctgaagcgcattcgttcacagtggcccagtgcggagaaagttaaacgtgcagacgctgtcatcgacaataatggcaatattgaagaaacccgccgccagctgctggacattttacaccagtgggatctgctggacaagggtggctccggccaccatcatcaccatcactaatga

SEQ ID NO: 4232 - protein, 211 aa, synthetic construct
  REGION 1..211: note = Variant of 3'O-kinase
MAVTIGLTGGIAAGKSTVSAMMRELGLPVIDADEAARAVMKPGEEAYRDIVAAFGPGILRADGEIDRQKLGAIRFSDEQQRKVLNSIVGPAVLKKMLAEKEAHIKSGAKTVVLDIPLLFESGLQSWVDKVLVVYVDDDVQLRRLMDRNGFTEEEALKRIRSQWPSAEKVKRADAVIDNNGNIEETRRQLLDILHQWDLLDKGGSGHHHHHH

SEQ ID NO: 4233 - DNA, 639 bp, synthetic construct
  misc_feature 1..639: note = Variant of 3'O-kinase
  source 1..639: mol_type = other DNA
atggcggttaccattggtttaacaggagggatcgcagcgggcaaatcgactgtgagtgccatgatgcgtgaactgggtctgccggtcatcgatgctgacgaggcagcacgcgccgttatgaagccaggcgaagaagcgtatcgcgacattgtagctgcgttcggtccgggcattcttcgtgcggatggcgagatcgatcgccagaaactgggtgctatccgcttttcggacgaacaacaacgtaaggtgctgaattcgattgtaggtcctgcagtcctgaagaagatgctcgctgagaaagaagctcatatcaagtcaggcgccaagacggttgtgctggatatcccgctgctgttcgaatccggattgcaatcgtgggtcgacaaagttctcgtggtgtacgtcgatgatgatgttcagttacgccgccttatggcacgtaacgggtttactgaagaagaagctctgaagcgcattcgtgttcagtggcccagtgcggagaaagttaaacgtgcagacgctgtcatcgacaataatggcaatattgaagaaacccgccgccagctgctggacattttacaccagtgggatctgctggacaagggtggctccggccaccatcatcaccatcactaatga

SEQ ID NO: 4234 - protein, 211 aa, synthetic construct
  REGION 1..211: note = Variant of 3'O-kinase
MAVTIGLTGGIAAGKSTVSAMMRELGLPVIDADEAARAVMKPGEEAYRDIVAAFGPGILRADGEIDRQKLGAIRFSDEQQRKVLNSIVGPAVLKKMLAEKEAHIKSGAKTVVLDIPLLFESGLQSWVDKVLVVYVDDDVQLRRLMARNGFTEEEALKRIRVQWPSAEKVKRADAVIDNNGNIEETRRQLLDILHQWDLLDKGGSGHHHHHH

SEQ ID NO: 4235 - DNA, 639 bp, synthetic construct
  misc_feature 1..639: note = Variant of 3'O-kinase
  source 1..639: mol_type = other DNA
atggcggttaccattggtttaacaggagggatcgcagcgggcaaatcgactgtgagtgccatgatgcgtgaactgggtctgccggtcatcgatgctgacgaggcagcacgcgccgttatgaagccaggcgaagaagcgtatcgcgacattgtagctgcgttcggtccgggcattcttcgtgcggatggcgagatcgatcgccagaaactgggtgctatccgcttttcggacgaacaacaacgtaaggtgctgaattcgattgtaggtcctgcagtcctgaagaagatgctcgctgagaaagaagctcatatcaagtcaggcgccaagacggttgtgctggattggccgctgctgttcgaatccggattgcaatcgtgggtcgacaaagttctcgtggtgtacgtcgatgatgatgttcagttacgccgccttatggcacgtaacgggtttactgaagaagaagctctgaagcgcattcgttcacagtggcccagtgcggagaaagttaaacgtgcagacgctgtcatcgacaataatggcaatattgaagaaacccgccgccagctgctggacattttacaccagtgggatctgctggacaagggtggctccggccaccatcatcaccatcactaatga

SEQ ID NO: 4236 - protein, 211 aa, synthetic construct
  REGION 1..211: note = Variant of 3'O-kinase
MAVTIGLTGGIAAGKSTVSAMMRELGLPVIDADEAARAVMKPGEEAYRDIVAAFGPGILRADGEIDRQKLGAIRFSDEQQRKVLNSIVGPAVLKKMLAEKEAHIKSGAKTVVLDWPLLFESGLQSWVDKVLVVYVDDDVQLRRLMARNGFTEEEALKRIRSQWPSAEKVKRADAVIDNNGNIEETRRQLLDILHQWDLLDKGGSGHHHHHH

SEQ ID NO: 4237 - DNA, 639 bp, synthetic construct
  misc_feature 1..639: note = Variant of 3'O-kinase
  source 1..639: mol_type = other DNA
atggcggttaccattggtttaacaggagggatcgcagcgggcaaatcgactgtgagtgccatgatgcgtgaactgggtctgccggtcatcgatgctgacgaggcagcacgcgccgttatgaagccaggcgaagaagcgtatcgcgacattgtagctgcgttcggtccgggcattcttcgtgcggatggcgagatcgatcgccagaggctgggtgctatccgcttttcggacgaacaacaacgtaaggtgctgaattcgattgtaggtcctgcagtcctgaagaagatgctcgctgagaaagaagctcatatcaagtcaggcgccaagacggttgtgctggatatcccgctgctgttcgaatccggattgcaatcgtgggtcgacaaagttctcgtggtgtacgtcgatgatgatgttcagttacgccgccttatggcacgtaacgggtttactgaagaagaagctctgaagcgcattcgttcacagtggcccagtgcggagaaagttaaacgtgcagacgctgtcatcgacaataatggcaatattgaagaaacccgccgccagctgctggacattttacaccagtgggatctgctggacaagggtggctccggccaccatcatcaccatcactaatga

SEQ ID NO: 4238 - protein, 211 aa, synthetic construct
  REGION 1..211: note = Variant of 3'O-kinase
MAVTIGLTGGIAAGKSTVSAMMRELGLPVIDADEAARAVMKPGEEAYRDIVAAFGPGILRADGEIDRQRLGAIRFSDEQQRKVLNSIVGPAVLKKMLAEKEAHIKSGAKTVVLDIPLLFESGLQSWVDKVLVVYVDDDVQLRRLMARNGFTEEEALKRIRSQWPSAEKVKRADAVIDNNGNIEETRRQLLDILHQWDLLDKGGSGHHHHHH

SEQ ID NO: 4239 - DNA, 639 bp, synthetic construct
  misc_feature 1..639: note = Variant of 3'O-kinase
  source 1..639: mol_type = other DNA
atggcggttaccattggtttaacaggagggatcgcagcgggcaaatcgactgtgagtgccatgatgcgtgaactgggtctgccggtcatcgatgctgacgaggcagcacgcgccgttatgaagccaggcgaagaagcgtatcgcgacattgtagctgcgttcggtccgggcattcttcgtgcggatggcgagatcgatcgccagaaactgggtgctatccgcttttcggacgaacaacaacgtaaggtgctgaattcgattgtaggtcctgcagtcctgaagaagatgctcgctgagaaagaagctcatatcaagtcaggcgccaagacggttgtgctggatatcccgctgctgttcgaatccggattgcaatcgtgggtcgacaaagttctcgtggtgtacgtcgatgatgatgttcagttacgccgccttatggcacgtaacgggtttactgaagaagaagctctgaagcgcattcgttcacagtggcccagtgcggagaaagttaaacgtgcagacgctgtcggggacaataatggcaatattgaagaaacccgccgccagctgctggacattttacaccagtgggatctgctggacaagggtggctccggccaccatcatcaccatcactaatga

SEQ ID NO: 4240 - protein, 211 aa, synthetic construct
  REGION 1..211: note = Variant of 3'O-kinase
MAVTIGLTGGIAAGKSTVSAMMRELGLPVIDADEAARAVMKPGEEAYRDIVAAFGPGILRADGEIDRQKLGAIRFSDEQQRKVLNSIVGPAVLKKMLAEKEAHIKSGAKTVVLDIPLLFESGLQSWVDKVLVVYVDDDVQLRRLMARNGFTEEEALKRIRSQWPSAEKVKRADAVGDNNGNIEETRRQLLDILHQWDLLDKGGSGHHHHHH

SEQ ID NO: 4241 - DNA, 639 bp, synthetic construct
  misc_feature 1..639: note = Variant of 3'O-kinase
  source 1..639: mol_type = other DNA
atggcggttaccattggtttaacaggagggatcgcagcgggcaaatcgactgtgagtgccatgatgcgtgaactgggtctgccggtcatcgatgctgacgaggcagcacgcgccgttatgaagccaggcgaagaagcgtatcgcgacattgtagctgcgttcggtccgggcattcttcgtgcggatggcgagatcgatcgccagaaactgggtgctatccgcttttcggacgaacaacaacgtaaggtgctgaattcgattgtaggtcctgcagtcctgaagaagatgctcgctgagaaagaagctcatatcaagtcaggcgccaagacggttgtgctggatatcccgctgctgttcgaatccggattgcaatcgtgggtcgacaaagttctcgtggtgtacgtcgatgatgatgttcagttacgccgccttatggcacgtaacgggtttactgaagaagaagctctgaagcgcattctttcacagtggcccagtgcggagaaagttaaacgtgcagacgctgtcatcgacaataatggcaatattgaagaaacccgccgccagctgctggacattttacaccagtgggatctgctggacaagggtggctccggccaccatcatcaccatcactaatga

SEQ ID NO: 4242 - protein, 211 aa, synthetic construct
  REGION 1..211: note = Variant of 3'O-kinase
MAVTIGLTGGIAAGKSTVSAMMRELGLPVIDADEAARAVMKPGEEAYRDIVAAFGPGILRADGEIDRQKLGAIRFSDEQQRKVLNSIVGPAVLKKMLAEKEAHIKSGAKTVVLDIPLLFESGLQSWVDKVLVVYVDDDVQLRRLMARNGFTEEEALKRILSQWPSAEKVKRADAVIDNNGNIEETRRQLLDILHQWDLLDKGGSGHHHHHH

SEQ ID NO: 4243 - DNA, 639 bp, synthetic construct
  misc_feature 1..639: note = Variant of 3'O-kinase
  source 1..639: mol_type = other DNA
atggcggttaccattggtttaacaggagggatcgcagcgggcaaatcgactgtgagtgccatgatgcgtgaactgggtctgccggtcatcgatgctgacgaggcagcacgcgccgttatgaagccaggcgaagaagcgtatcgcgacattgtagctgcgttcggtccgggcattcttcgtgcggatggcgagatcgatcgccagaaactgggtgctatccgcttttcggacgaacaacaacgtaaggtgctgaattcgattgtaggtcctgcagtcctgaagaagatgctcgctgagaaagaagctcatatcaagtcaggcgccaagacggttgtgctggatatcccgctgctgttcgaatccggattgcaatcgtgggtcgacaaagttctcgtggtgtacgtcgatgatgatgttcagttacgccgccttatggcacgtaacgggtttactgaagaagaagctctgaagcgcattcgttcacagtggcccagtgcggagaaagttaaacgtgcagacgctgtcctggacaataatggcaatattgaagaaacccgccgccagctgctggacattttacaccagtgggatctgctggacaagggtggctccggccaccatcatcaccatcactaatga

SEQ ID NO: 4244 - protein, 211 aa, synthetic construct
  REGION 1..211: note = Variant of 3'O-kinase
MAVTIGLTGGIAAGKSTVSAMMRELGLPVIDADEAARAVMKPGEEAYRDIVAAFGPGILRADGEIDRQKLGAIRFSDEQQRKVLNSIVGPAVLKKMLAEKEAHIKSGAKTVVLDIPLLFESGLQSWVDKVLVVYVDDDVQLRRLMARNGFTEEEALKRIRSQWPSAEKVKRADAVLDNNGNIEETRRQLLDILHQWDLLDKGGSGHHHHHH

SEQ ID NO: 4245 - DNA, 639 bp, synthetic construct
  misc_feature 1..639: note = Variant of 3'O-kinase
  source 1..639: mol_type = other DNA
atggcggttaccattggtttaacaggagggatcgcagcgggcaaatcgactgtgagtgccatgatgcgtgaactgggtctgccggtcatcgatgctgacgaggcagcacgcgccgttatgaagccaggcgaagaagcgtatcgcgacattgtagctgcgttcggtccgggcattcttcgtgcggatggcgagatcgatcgccagaaactgattgctatccgcttttcggacgaacaacaacgtaaggtgctgaattcgattgtaggtcctgcagtcctgaagaagatgctcgctgagaaagaagctcatatcaagtcaggcgccaagacggttgtgctggatatcccgctgctgttcgaatccggattgcaatcgtgggtcgacaaagttctcgtggtgtacgtcgatgatgatgttcagttacgccgccttatggcacgtaacgggtttactgaagaagaagctctgaagcgcattcgttcacagtggcccagtgcggagaaagttaaacgtgcagacgctgtcatcgacaataatggcaatattgaagaaacccgccgccagctgctggacattttacaccagtgggatctgctggacaagggtggctccggccaccatcatcaccatcactaatga

SEQ ID NO: 4246 - protein, 211 aa, synthetic construct
  REGION 1..211: note = Variant of 3'O-kinase
MAVTIGLTGGIAAGKSTVSAMMRELGLPVIDADEAARAVMKPGEEAYRDIVAAFGPGILRADGEIDRQKLIAIRFSDEQQRKVLNSIVGPAVLKKMLAEKEAHIKSGAKTVVLDIPLLFESGLQSWVDKVLVVYVDDDVQLRRLMARNGFTEEEALKRIRSQWPSAEKVKRADAVIDNNGNIEETRRQLLDILHQWDLLDKGGSGHHHHHH

SEQ ID NO: 4247 - DNA, 639 bp, synthetic construct
  misc_feature 1..639: note = Variant of 3'O-kinase
  source 1..639: mol_type = other DNA
atggcggttaccattggtttaacaggagggatcgcagcgggcaaatcgactgtgagtgccatgatgcgtgaactgggtctgccggtcatcgatgctgacgaggcagcacgcgccgttatgaagccaggcgaagaagcgtatcgcgacattgtagctgcgttcggtccgggcattcttcgtgcggatggcgagatcgatcgccagaaactgggtgctatccgcttttcggacgaacaacaacgtaaggtgctgaattcgattgtaggtcctgcagtcctgaagaagatgctcgctgagaaagaagctcatatcaagtcaggcgccaagacggttgtgctggatatcccgctgctgttcgaatccggattgcaatcgtgggtcgacaaagttctcgtggtgtacgtcgatgatgatgttcagttacgccgccttatggcacgtaacgggtttactgaagaagaagctctgaagcgcattcgttcacagtggcccagtgcggagaaagttaaacgtgcagacgctgtcatcgacaataatggcaatgaggaagaaacccgccgccagctgctggacattttacaccagtgggatctgctggacaagggtggctccggccaccatcatcaccatcactaatga

SEQ ID NO: 4248 - protein, 211 aa, synthetic construct
  REGION 1..211: note = Variant of 3'O-kinase
MAVTIGLTGGIAAGKSTVSAMMRELGLPVIDADEAARAVMKPGEEAYRDIVAAFGPGILRADGEIDRQKLGAIRFSDEQQRKVLNSIVGPAVLKKMLAEKEAHIKSGAKTVVLDIPLLFESGLQSWVDKVLVVYVDDDVQLRRLMARNGFTEEEALKRIRSQWPSAEKVKRADAVIDNNGNEEETRRQLLDILHQWDLLDKGGSGHHHHHH

SEQ ID NO: 4249 - DNA, 639 bp, synthetic construct
  misc_feature 1..639: note = Variant of 3'O-kinase
  source 1..639: mol_type = other DNA
atggcggttaccattggtttaacaggagggatcgcagcgggcaaatcgactgtgagtgccatgatgcgtgaactgggtctgccggtcatcgatgctgacgaggcagcacgcgccgttatgaagccaggcgaagaagcgtatcgcgacattgtagctgcgttcggtccgggcattcttcgtgcggatggcgagatcgatcgccagaaactgggtgctatcattttttcggacgaacaacaacgtaaggtgctgaattcgattgtaggtcctgcagtcctgaagaagatgctcgctgagaaagaagctcatatcaagtcaggcgccaagacggttgtgctggatatcccgctgctgttcgaatccggattgcaatcgtgggtcgacaaagttctcgtggtgtacgtcgatgatgatgttcagttacgccgccttatggcacgtaacgggtttactgaagaagaagctctgaagcgcattcgttcacagtggcccagtgcggagaaagttaaacgtgcagacgctgtcatcgacaataatggcaatattgaagaaacccgccgccagctgctggacattttacaccagtgggatctgctggacaagggtggctccggccaccatcatcaccatcactaatga

SEQ ID NO: 4250 - protein, 211 aa, synthetic construct
  REGION 1..211: note = Variant of 3'O-kinase
MAVTIGLTGGIAAGKSTVSAMMRELGLPVIDADEAARAVMKPGEEAYRDIVAAFGPGILRADGEIDRQKLGAIIFSDEQQRKVLNSIVGPAVLKKMLAEKEAHIKSGAKTVVLDIPLLFESGLQSWVDKVLVVYVDDDVQLRRLMARNGFTEEEALKRIRSQWPSAEKVKRADAVIDNNGNIEETRRQLLDILHQWDLLDKGGSGHHHHHH

SEQ ID NO: 4251 - DNA, 639 bp, synthetic construct
  misc_feature 1..639: note = Variant of 3'O-kinase
  source 1..639: mol_type = other DNA
atggcggttaccattggtttaacaggagggatcgcagcgggcaaatcgactgtgagtgccatgatgcgtgaactgggtctgccggtcatcgatgctgacgaggcagcacgcgccgttatgaagccaggcgaagaagcgtatcgcgacattgtagctgcgttcggtccgggcattcttcgtgcggatggcgagatcgatcgccagaaactgactgctatccgcttttcggacgaacaacaacgtaaggtgctgaattcgattgtaggtcctgcagtcctgaagaagatgctcgctgagaaagaagctcatatcaagtcaggcgccaagacggttgtgctggatatcccgctgctgttcgaatccggattgcaatcgtgggtcgacaaagttctcgtggtgtacgtcgatgatgatgttcagttacgccgccttatggcacgtaacgggtttactgaagaagaagctctgaagcgcattcgttcacagtggcccagtgcggagaaagttaaacgtgcagacgctgtcatcgacaataatggcaatattgaagaaacccgccgccagctgctggacattttacaccagtgggatctgctggacaagggtggctccggccaccatcatcaccatcactaatga

SEQ ID NO: 4252 - protein, 211 aa, synthetic construct
  REGION 1..211: note = Variant of 3'O-kinase
MAVTIGLTGGIAAGKSTVSAMMRELGLPVIDADEAARAVMKPGEEAYRDIVAAFGPGILRADGEIDRQKLTAIRFSDEQQRKVLNSIVGPAVLKKMLAEKEAHIKSGAKTVVLDIPLLFESGLQSWVDKVLVVYVDDDVQLRRLMARNGFTEEEALKRIRSQWPSAEKVKRADAVIDNNGNIEETRRQLLDILHQWDLLDKGGSGHHHHHH

SEQ ID NO: 4253 - DNA, 639 bp, synthetic construct
  misc_feature 1..639: note = Variant of 3'O-kinase
  source 1..639: mol_type = other DNA
atggcggttaccattggtttaacaggagggatcgcagcgggcaaatcgactgtgagtgccatgatgcgtgaactgggtctgccggtcatcgatgctgacgaggcagcacgcgccgttatgaagccaggcgaagaagcgtatcgcgacattgtagctgcgttcggtccgggcattcttcgtgcggatggcgagatcgatcgccagaaactgtatgctatccgcttttcggacgaacaacaacgtaaggtgctgaattcgattgtaggtcctgcagtcctgaagaagatgctcgctgagaaagaagctcatatcaagtcaggcgccaagacggttgtgctggatatcccgctgctgttcgaatccggattgcaatcgtgggtcgacaaagttatcgtggtgtacgtcgatgatgatgttcagttacgccgccttatggcacgtaacgggtttactgaagaagaagctctgaagcgcattcgttcacagtggcccagtgcggagaaagttaaacgtgcagacgctgtcatcgacaataatggcaatattgaagaaacccgccgccagctgctggacattttacaccagtgggatctgctggacaagggtggctccggccaccatcatcaccatcactaatga

SEQ ID NO: 4254 - protein, 211 aa, synthetic construct
  REGION 1..211: note = Variant of 3'O-kinase
MAVTIGLTGGIAAGKSTVSAMMRELGLPVIDADEAARAVMKPGEEAYRDIVAAFGPGILRADGEIDRQKLYAIRFSDEQQRKVLNSIVGPAVLKKMLAEKEAHIKSGAKTVVLDIPLLFESGLQSWVDKVIVVYVDDDVQLRRLMARNGFTEEEALKRIRSQWPSAEKVKRADAVIDNNGNIEETRRQLLDILHQWDLLDKGGSGHHHHHH

SEQ ID NO: 4255 - DNA, 639 bp, synthetic construct
  misc_feature 1..639: note = Variant of 3'O-kinase
  source 1..639: mol_type = other DNA
atggcggttaccattggtttaacaggagggatcgcagcgggcaaatcgactgtgagtgccatgatgcgtgaactgggtctgccggtcatcgatgctgacgaggcagcacgcgccgttatgaagccaggcgaagaagcgtatcgcgacattgtagctgcgttcggtccgggcattcttcgtgcggatggcgagatcgatcgccagaaactgggtgctatccgcttttcggacgaacaacaacgtaaggtgctgaattcgattgtaggtcctgcagtcctgaagaagatgctcgctgagaaagaagctcatatcaagtcaggcgccaagacggttgtgctggatatcccgctgctgttcgaatccggattgcaatcgtgggtcgacaaagttctcgtggtgtacgtcgatgatgatgttcagttacgccgccttatggcacgtaacgggtttactgaagaagaagctctgaagcgcattcgttcacagtggcccattgcggagaaagttaaacgtgcagacgctgtcatcgacaataatggcaatattgaagaaacccgccgccagctgctggacattttacaccagtgggatctgctggacaagggtggctccggccaccatcatcaccatcactaatga

SEQ ID NO: 4256 - protein, 211 aa, synthetic construct
  REGION 1..211: note = Variant of 3'O-kinase
MAVTIGLTGGIAAGKSTVSAMMRELGLPVIDADEAARAVMKPGEEAYRDIVAAFGPGILRADGEIDRQKLGAIRFSDEQQRKVLNSIVGPAVLKKMLAEKEAHIKSGAKTVVLDIPLLFESGLQSWVDKVLVVYVDDDVQLRRLMARNGFTEEEALKRIRSQWPIAEKVKRADAVIDNNGNIEETRRQLLDILHQWDLLDKGGSGHHHHHH

SEQ ID NO: 4257 - DNA, 639 bp, synthetic construct
  misc_feature 1..639: note = Variant of 3'O-kinase
  source 1..639: mol_type = other DNA
atggcggttaccattggtttaacaggagggatcgcagcgggcaaatcgactgtgagtgccatgatgcgtgaactgggtctgccggtcatcgatgctgacgaggcagcacgcgccgttatgaagccaggcgaagaagcgtatcgcgacattgtagctgcgttcggtccgggcattcttcgtgcggatggcgagatcgatcgccagaaactgggtgctatccgcttttcggacgaacaacaacgtaaggtgctgaattcgattgtaggtcctgcagtcctgaagaagatgctcgctgagaaagaagcttttatcaagtcaggcgccaagacggttgtgctggatatcccgctgctgttcgaatccggattgcaatcgtgggtcgacaaagttctcgtggtgtacgtcgatgatgatgttcagttacgccgccttatggcacgtaacgggtttactgaagaagaagctctgaagcgcattcgttcacagtggcccagtgcggagaaagttaaacgtgcagacgctgtcatcgacaataatggcaatattgaagaaacccgccgccagctgctggacattttacaccagtgggatctgctggacaagggtggctccggccaccatcatcaccatcactaatga

SEQ ID NO: 4258 - protein, 211 aa, synthetic construct
  REGION 1..211: note = Variant of 3'O-kinase
MAVTIGLTGGIAAGKSTVSAMMRELGLPVIDADEAARAVMKPGEEAYRDIVAAFGPGILRADGEIDRQKLGAIRFSDEQQRKVLNSIVGPAVLKKMLAEKEAFIKSGAKTVVLDIPLLFESGLQSWVDKVLVVYVDDDVQLRRLMARNGFTEEEALKRIRSQWPSAEKVKRADAVIDNNGNIEETRRQLLDILHQWDLLDKGGSGHHHHHH

SEQ ID NO: 4259 - DNA, 639 bp, synthetic construct
  misc_feature 1..639: note = Variant of 3'O-kinase
  source 1..639: mol_type = other DNA
atggcggttaccattggtttaacaggagggatcgcagcgggcaaatcgactgtgagtgccatgatgcgtgaactgggtctgccggtcatcgatgctgacgaggcagcacgcgccgttatgaagccaggcgaagaagcgtatcgcgacattgtagctgcgttcggtccgggcattcttcgtgcggatggcgagatcgatcgccagaaactgggtgctatccgcttttcggacgaacaacaacgtaaggtgctgaattcgattgtaggtcctgcagtcctgaagaagatgctcgctgagaaagaagctcatatcaagtcaggcgccaagacggttgtgctggatatcccgctgctgttcgaatccggattgcaatcgtgggtcgacaaagttctcgtggtgtacgtcgatgatgatgttcagcctcgccgccttatggcacgtaacgggtttactgaagaagaagctctgaagcgcattcgttcacagtggcccagtgcggagaaagttaaacgtgcagacgctgtcatcgacaataatggcaatattgaagaaacccgccgccagctgctggacattttacaccagtgggatctgctggacaagggtggctccggccaccatcatcaccatcactaatga

SEQ ID NO: 4260 - protein, 211 aa, synthetic construct
  REGION 1..211: note = Variant of 3'O-kinase
MAVTIGLTGGIAAGKSTVSAMMRELGLPVIDADEAARAVMKPGEEAYRDIVAAFGPGILRADGEIDRQKLGAIRFSDEQQRKVLNSIVGPAVLKKMLAEKEAHIKSGAKTVVLDIPLLFESGLQSWVDKVLVVYVDDDVQPRRLMARNGFTEEEALKRIRSQWPSAEKVKRADAVIDNNGNIEETRRQLLDILHQWDLLDKGGSGHHHHHH

SEQ ID NO: 4261 - DNA, 639 bp, synthetic construct
  misc_feature 1..639: note = Variant of 3'O-kinase
  source 1..639: mol_type = other DNA
atggcggttaccattggtttaacaggagggatcgcagcgggcaaatcgactgtgagtgccatgatgcgtgaactgggtctgccggtcatcgatgctgacgaggcagcacgcgccgttatgaagccaggcgaagaagcgtatcgcgacattgtagctgcgttcggtccgggcattcttcgtgcggatggcgagatcgatcgccagaaactgggtgctatccgcttttcggacgaacaacaacgtaaggtgctgaattcgattgtaggtcctgcagtcctgaagaagatgctcgctgagaaagaagctcatatcaagtcaggcgccaagacggttgtgctggatatcccgctgctgttcgaatccggattgcaatcgtgggtcgacaaagttctcgtggtgtacgtcgatgatgatgttcagttacgccgccttatgactcgtaacgggtttactgaagaagaagctctgaagcgcattcgttcacagtggcccagtgcggagaaagttaaacgtgcagacgctgtcatcgacaataatggcaatattgaagaaacccgccgccagctgctggacattttacaccagtgggatctgctggacaagggtggctccggccaccatcatcaccatcactaatga

SEQ ID NO: 4262 - protein, 211 aa, synthetic construct
  REGION 1..211: note = Variant of 3'O-kinase
MAVTIGLTGGIAAGKSTVSAMMRELGLPVIDADEAARAVMKPGEEAYRDIVAAFGPGILRADGEIDRQKLGAIRFSDEQQRKVLNSIVGPAVLKKMLAEKEAHIKSGAKTVVLDIPLLFESGLQSWVDKVLVVYVDDDVQLRRLMTRNGFTEEEALKRIRSQWPSAEKVKRADAVIDNNGNIEETRRQLLDILHQWDLLDKGGSGHHHHHH

SEQ ID NO: 4263 - DNA, 639 bp, synthetic construct
  misc_feature 1..639: note = Variant of 3'O-kinase
  source 1..639: mol_type = other DNA
atggcggttaccattggtttaacaggagggatcgcagcgggcaaatcgactgtgagtgccatgatgcgtgaactgggtctgccggtcatcgatgctgacgaggcagcacgcgccgttatgaagccaggcgaagaagcgtatcgcgacattgtagctgcgttcggtccgggcattcttcgtgcggatggcgagatcgatcgccagaaactgggtgctatccgcttttcggacgaacaacaacgtaaggtgctgaattcgattgtaggtcctgcagtcctgaagaagatgctcgctgagaaagaagctcatatcaagtcaggcgccaagacggttgtgctggatatcccgctgctgttcgaatccggattgcaatcgtgggtcgacaaagttctcgtggtgtacgtcgatgatgatgttcagttacgccgccttatgagtcgtaacgggtttactgaagaagaagctctgaagcgcattcgttcacagtggcccagtgcggagaaagttaaacgtgcagacgctgtcatcgacaataatggcaatattgaagaaacccgccgccagctgctggacattttacaccagtgggatctgctggacaagggtggctccggccaccatcatcaccatcactaatga

SEQ ID NO: 4264 - protein, 211 aa, synthetic construct
  REGION 1..211: note = Variant of 3'O-kinase
MAVTIGLTGGIAAGKSTVSAMMRELGLPVIDADEAARAVMKPGEEAYRDIVAAFGPGILRADGEIDRQKLGAIRFSDEQQRKVLNSIVGPAVLKKMLAEKEAHIKSGAKTVVLDIPLLFESGLQSWVDKVLVVYVDDDVQLRRLMSRNGFTEEEALKRIRSQWPSAEKVKRADAVIDNNGNIEETRRQLLDILHQWDLLDKGGSGHHHHHH

SEQ ID NO: 4265 - DNA, 639 bp, synthetic construct
  misc_feature 1..639: note = Variant of 3'O-kinase
  source 1..639: mol_type = other DNA
atggcggttaccattggtttaacaggagggatcgcagcgggcaaatcgactgtgagtgccatgatgcgtgaactgggtctgccggtcatcgatgctgacgaggcagcacgcgccgttatgaagccaggcgaagaagcgtatcgcgacattgtagctgcgttcggtccgggcattcttcgtgcggatggcgagatcgatcgccagaaactgggtgctatccgcttttcggacgaacaacaacgtaaggtgctgaattcgattgtaggtcctgcagtcctgaagaagatgctcgctgagaaagaagctcatatcaagtcaggcgccaagacggttgtgctggatatcccgctgctgttcgaatccggattgcaatcgtgggtcgacaaagttctcgtggtgcttgtcgatgatgatgttcagttacgccgccttatggcacgtaacgggtttactgaagaagaagctctgaagcgcattcgttcacagtggcccagtgcggagaaagttaaacgtgcagacgctgtcatcgacaataatggcaatattgaagaaacccgccgccagctgctggacattttacaccagtgggatctgctggacaagggtggctccggccaccatcatcaccatcactaatga

SEQ ID NO: 4266 - protein, 211 aa, synthetic construct
  REGION 1..211: note = Variant of 3'O-kinase
MAVTIGLTGGIAAGKSTVSAMMRELGLPVIDADEAARAVMKPGEEAYRDIVAAFGPGILRADGEIDRQKLGAIRFSDEQQRKVLNSIVGPAVLKKMLAEKEAHIKSGAKTVVLDIPLLFESGLQSWVDKVLVVLVDDDVQLRRLMARNGFTEEEALKRIRSQWPSAEKVKRADAVIDNNGNIEETRRQLLDILHQWDLLDKGGSGHHHHHH

SEQ ID NO: 4267 - DNA, 639 bp, synthetic construct
  misc_feature 1..639: note = Variant of 3'O-kinase
  source 1..639: mol_type = other DNA
atggcggttaccattggtttaacaggagggatcgcagcgggcaaatcgactgtgagtgccatgatgcgtgaactgggtctgccggtcatcgatgctgacgaggcagcacgcgccgttatgaagccaggcgaagaagcgtatcgcgacattgtagctgcgttcggtccgggcattcttcgtgcggatggcgagatcgatcgccagaaactgggtgctatccgcttttcggacgaacaacaacgtaaggtgctgaattcgattgtaggtcctgcagtcctgaagaagatgctcgctgagaaagaagctcatatcaagtcaggcgccaagacggttgtgctggatatcccgctgctgttcgaatccggattgcattcgtgggtcgacaaagttctcgtggtgtacgtcgatgatgatgttcagttacgccgccttatggcacgtaacgggtttactgaagaagaagctctgaagcgcattcgttcacagtggcccagtgcggagaaagttaaacgtgcagacgctgtcatcgacaataatggcaatattgaagaaacccgccgccagctgctggacattttacaccagtgggatctgctggacaagggtggctccggccaccatcatcaccatcactaatga

SEQ ID NO: 4268 - protein, 211 aa, synthetic construct
  REGION 1..211: note = Variant of 3'O-kinase
MAVTIGLTGGIAAGKSTVSAMMRELGLPVIDADEAARAVMKPGEEAYRDIVAAFGPGILRADGEIDRQKLGAIRFSDEQQRKVLNSIVGPAVLKKMLAEKEAHIKSGAKTVVLDIPLLFESGLHSWVDKVLVVYVDDDVQLRRLMARNGFTEEEALKRIRSQWPSAEKVKRADAVIDNNGNIEETRRQLLDILHQWDLLDKGGSGHHHHHH

SEQ ID NO: 4269 - DNA, 639 bp, synthetic construct
  misc_feature 1..639: note = Variant of 3'O-kinase
  source 1..639: mol_type = other DNA
atggcggttaccattggtttaacaggagggatcgcagcgggcaaatcgactgtgagtgccatgatgcgtgaactgggtctgccggtcatcgatgctgacgaggcagcacgcgccgttatgaagccaggcgaagaagcgtatcgcgacattgtagctgcgttcggtccgggcattcttcgtgcggatggcgagatcgatcgccagaaactgggtgctatccgcttttcggacgaacaacaacgtaaggtgctgaattcgattgtaggtcctgcagtcactaagaagatgctcgctgagaaagaagctcatatcaagtcaggcgccaagacggttgtgctggatatcccgctgctgttcgaatccggattgcaatcgtgggtcgacaaagttctcgtggtgtacgtcgatgatgatgttcagttacgccgccttatggcacgtaacgggtttactgaagaagaagctctgaagcgcattcgttcacagtggcccagtgcggagaaagttaaacgtgcagacgctgtcatcgacaataatggcaatattgaagaaacccgccgccagctgctggacattttacaccagtgggatctgctggacaagggtggctccggccaccatcatcaccatcactaatga

SEQ ID NO: 4270 - protein, 211 aa, synthetic construct
  REGION 1..211: note = Variant of 3'O-kinase
MAVTIGLTGGIAAGKSTVSAMMRELGLPVIDADEAARAVMKPGEEAYRDIVAAFGPGILRADGEIDRQKLGAIRFSDEQQRKVLNSIVGPAVTKKMLAEKEAHIKSGAKTVVLDIPLLFESGLQSWVDKVLVVYVDDDVQLRRLMARNGFTEEEALKRIRSQWPSAEKVKRADAVIDNNGNIEETRRQLLDILHQWDLLDKGGSGHHHHHH

SEQ ID NO: 4271 - DNA, 639 bp, synthetic construct
  misc_feature 1..639: note = Variant of 3'O-kinase
  source 1..639: mol_type = other DNA
atggcggttaccattggtttaacaggagggatcgcagcgggcaaatcgactgtgagtgccatgatgcgtgaactgggtctgccggtcatcgatgctgacgaggcagcacgcgccgttatgaagccaggcgaagaagcgtatcgcgacattgtagctgcgttcggtccgggcattcttcgtgcggatggcgagatcgatcgccagaaactgggtgctatccgcttttcggacgaacaacaacgtaaggtgctgaattcgattgtaggtcctgcagtcctgaagaagatgctcgctgagaaagaagctcatatcaagtcaggcgccaagacggttgtgctggatgtgccgctgctgttcgaatccggattgcaatcgtgggtcgacaaagttctcgtggtgtacgtcgatgatgatgttcagttacgccgccttatggcacgtaacgggtttactgaagaagaagctctgaagcgcattcgttcacagtggcccagtgcggagaaagttaaacgtgcagacgctgtcatcgacaataatggcaatattgaagaaacccgccgccagctgctggacattttacaccagtgggatctgctggacaagggtggctccggccaccatcatcaccatcactaatga

SEQ ID NO: 4272 - protein, 211 aa, synthetic construct
  REGION 1..211: note = Variant of 3'O-kinase
MAVTIGLTGGIAAGKSTVSAMMRELGLPVIDADEAARAVMKPGEEAYRDIVAAFGPGILRADGEIDRQKLGAIRFSDEQQRKVLNSIVGPAVLKKMLAEKEAHIKSGAKTVVLDVPLLFESGLQSWVDKVLVVYVDDDVQLRRLMARNGFTEEEALKRIRSQWPSAEKVKRADAVIDNNGNIEETRRQLLDILHQWDLLDKGGSGHHHHHH

SEQ ID NO: 4273 - DNA, 639 bp, synthetic construct
  misc_feature 1..639: note = Variant of 3'O-kinase
  source 1..639: mol_type = other DNA
atggcggttaccattggtttaacaggagggatcgcagcgggcaaatcgactgtgagtgccatgatgcgtgaactgggtctgccggtcatcgatgctgacgaggcagcacgcgccgttatgaagccaggcgaagaagcgtatcgcgacattgtagctgcgttcggtccgggcattcttcgtgcggatggcgagatcgatcgccagaaactgggtgctatccgcttttcggacgaacaacaacgtaaggtgctgaattcgattgtaggtcctgcagtcctgaagagtatgctcgctgagaaagaagctcatatcaagtcaggcgccaagacggttgtgctggatatcccgctgctgttcgaatccggattgcaatcgtgggtcgacaaagttctcgtggtgtacgtcgatgatgatgttcagttacgccgccttatggcacgtaacgggtttactgaagaagaagctctgaagcgcattcgttcacagtggcccagtgcggagaaagttaaacgtgcagacgctgtcatcgacaataatggcaatattgaagaaacccgccgccagctgctggacattttacaccagtgggatctgctggacaagggtggctccggccaccatcatcaccatcactaatga

SEQ ID NO: 4274 - protein, 211 aa, synthetic construct
  REGION 1..211: note = Variant of 3'O-kinase
MAVTIGLTGGIAAGKSTVSAMMRELGLPVIDADEAARAVMKPGEEAYRDIVAAFGPGILRADGEIDRQKLGAIRFSDEQQRKVLNSIVGPAVLKSMLAEKEAHIKSGAKTVVLDIPLLFESGLQSWVDKVLVVYVDDDVQLRRLMARNGFTEEEALKRIRSQWPSAEKVKRADAVIDNNGNIEETRRQLLDILHQWDLLDKGGSGHHHHHH

SEQ ID NO: 4275 - DNA, 639 bp, synthetic construct
  misc_feature 1..639: note = Variant of 3'O-kinase
  source 1..639: mol_type = other DNA
atggcggttaccattggtttaacaggagggatcgcagcgggcaaatcgactgtgagtgccatgatgcgtgaactgggtctgccggtcatcgatgctgacgaggcagcacgcgccgttatgaagccaggcgaagaagcgtatcgcgacattgtagctgcgttcggtccgggcattcttcgtgcggatggcgagatcgatcgccagaaactgggtgctatccgcttttcggacgaacaacaacgtaaggtgctgaattcgattgtaggtcctgcagtcctgaagaagatgctcgctgagaaagaagctcatatcaagtcaggcgccaagacggttgtgctggatatcccgctgctgttcgaatccggattgcaatcgtgggtcgacaaagttctcgtggtgtacgtcgatgatgatgttcagttacgccgccttatggcacgtaacgggtttactgaagaagaagctcctaagcgcattcgttcacagtggcccagtgcggagaaagttaaacgtgcagacgctgtcatcgacaataatggcaatattgaagaaacccgccgccagctgctggacattttacaccagtgggatctgctggacaagggtggctccggccaccatcatcaccatcactaatga

SEQ ID NO: 4276 - protein, 211 aa, synthetic construct
  REGION 1..211: note = Variant of 3'O-kinase
MAVTIGLTGGIAAGKSTVSAMMRELGLPVIDADEAARAVMKPGEEAYRDIVAAFGPGILRADGEIDRQKLGAIRFSDEQQRKVLNSIVGPAVLKKMLAEKEAHIKSGAKTVVLDIPLLFESGLQSWVDKVLVVYVDDDVQLRRLMARNGFTEEEAPKRIRSQWPSAEKVKRADAVIDNNGNIEETRRQLLDILHQWDLLDKGGSGHHHHHH

SEQ ID NO: 4277 - DNA, 639 bp, synthetic construct
  misc_feature 1..639: note = Variant of 3'O-kinase
  source 1..639: mol_type = other DNA
atggcggttaccattggtttaacaggagggatcgcagcgggcaaatcgactgtgagtgccatgatgcgtgaactgggtctgccggtcatcgatgctgacgaggcagcacgcgccgtgatgaagccaggcgaagaagcgtatcgcgacattgtagctgcgttcggtccgggcattcttcgtgcggatggcgagatcgatcgccagaaactgggtgctatccgcttttcggacgaacaacaacgtaaggtgctgaattcgattgtaggtcctgcagtcctgaagaagatgctcgctgagaaagaagctcatatcaagtcaggcgccaagacggttgtgctggatatcccgctgctgttcgaatccggattgcaatcgtgggtcgacaaagttctcgtggtgtacgtcgatgatgatgttcagttacgccgccttatggcacgtaacgggtttactgaagaagaagctctgaagcacattcgttcacagtggcccagtgcggagaaagttaaacgtgcagacgctgtcatcgacaataatggcaatattgaagaaacccgccgccagctgctggacattttacaccagtgggatctgctggacaagggtggctccggccaccatcatcaccatcactaatga

SEQ ID NO: 4278 - protein, 211 aa, synthetic construct
  REGION 1..211: note = Variant of 3'O-kinase
MAVTIGLTGGIAAGKSTVSAMMRELGLPVIDADEAARAVMKPGEEAYRDIVAAFGPGILRADGEIDRQKLGAIRFSDEQQRKVLNSIVGPAVLKKMLAEKEAHIKSGAKTVVLDIPLLFESGLQSWVDKVLVVYVDDDVQLRRLMARNGFTEEEALKHIRSQWPSAEKVKRADAVIDNNGNIEETRRQLLDILHQWDLLDKGGSGHHHHHH

SEQ ID NO: 4279 - DNA, 639 bp, synthetic construct
  misc_feature 1..639: note = Variant of 3'O-kinase
  source 1..639: mol_type = other DNA
atggcggttaccattggtttaacaggagggatcgcagcgggcaaatcgactgtgagtgccatgatgcgtgaactgggtctgccggtcatcgatgctgacgaggcagcacgcgccgttatgaagccaggcgaagaagcgtatcgcgacattgtagctgcgttcggtccgggcattcttcgtgcggatggcgagatcgatcgccagaaactgggtgctatccgcttttcggacgaacaacaacgtaaggtgctgaattcgattgtaggtcctgcagtcctgaagaagatgctcgctgagaaagaagctcatatcaagtcaggcgccaagacggttgtgctggatatcccgctgctgttcgaatccggattgcaatcgtgggtcgacaaagttctcgtggtgtacgtcgatgatgatgttcagttacgccgccttatggcacgtaacgggtttactgaagaagaagctctgaagcgcattcgttcacagtggccccaggcggagaaagttaaacgtgcagacgctgtcatcgacaataatggcaatattgaagaaacccgccgccagctgctggacattttacaccagtgggatctgctggacaagggtggctccggccaccatcatcaccatcactaatga

SEQ ID NO: 4280 - protein, 211 aa, synthetic construct
  REGION 1..211: note = Variant of 3'O-kinase
MAVTIGLTGGIAAGKSTVSAMMRELGLPVIDADEAARAVMKPGEEAYRDIVAAFGPGILRADGEIDRQKLGAIRFSDEQQRKVLNSIVGPAVLKKMLAEKEAHIKSGAKTVVLDIPLLFESGLQSWVDKVLVVYVDDDVQLRRLMARNGFTEEEALKRIRSQWPQAEKVKRADAVIDNNGNIEETRRQLLDILHQWDLLDKGGSGHHHHHH

SEQ ID NO: 4281 - DNA, 639 bp, synthetic construct
  misc_feature 1..639: note = Variant of 3'O-kinase
  source 1..639: mol_type = other DNA
atggcggttaccattggtttaacaggagggatcgcagcgggcaaatcgactgtgagtgccatgatggcggaactgggtctgccggtcatcgatgctgacgaggcagcacgcgccgttatgaagccaggcgaagaagcgtatcgcgacattgtagctgcgttcggtccgggcattcttcgtgcggatggcgagatcgatcgccagaaactgggtgctatccgcttttcggacgaacaacaacgtaaggtgctgaattcgattgtaggtcctgcagtcctgaagaagatgctcgctgagaaagaagctcatatcaagtcaggcgccaagacggttgtgctggatatcccgctgctgttcgaatccggattgcaatcgtgggtcgacaaagttctcgtggtgtacgtcgatgatgatgttcagttacgccgccttatggcacgtaacgggtttactgaagaagaagctctgaagcgcattcgttcacagtggcccagtgcggagaaagttaaacgtgcagacgctgtcatcgacaataatggcaatattgaagaaacccgccgccagctgctggacattttacaccagtgggatctgctggacaagggtggctccggccaccatcatcaccatcactaatga

SEQ ID NO: 4282 - protein, 211 aa, synthetic construct
  REGION 1..211: note = Variant of 3'O-kinase
MAVTIGLTGGIAAGKSTVSAMMAELGLPVIDADEAARAVMKPGEEAYRDIVAAFGPGILRADGEIDRQKLGAIRFSDEQQRKVLNSIVGPAVLKKMLAEKEAHIKSGAKTVVLDIPLLFESGLQSWVDKVLVVYVDDDVQLRRLMARNGFTEEEALKRIRSQWPSAEKVKRADAVIDNNGNIEETRRQLLDILHQWDLLDKGGSGHHHHHH

SEQ ID NO: 4283 - DNA, 639 bp, synthetic construct
  misc_feature 1..639: note = Variant of 3'O-kinase
  source 1..639: mol_type = other DNA
atggcggttaccattggtttaacaggagggatcgcagcgggcaaatcgactgtgagtgccatgatgcgtgaactgggtctgccggtcatcgatgctgacgaggcagcacgcgccgttatgaagccaggcgaagaagcgtatcgcgacattgtagctgcgttcggtccgggcattcttcgtgcggggggcgagatcgatcgccagaaactgggtgctatccgcttttcggacgaacaacaacgtaaggtgctgaattcgattgtaggtcctgcagtcctgaagaagatgctcgctgagaaagaagctcatatcaagtcaggcgccaagacggttgtgctggatatcccgctgctgttcgaatccggattgcaatcgtgggtcgacaaagttctcgtggtgtacgtcgatgatgatgttcagttacgccgccttatggcacgtaacgggtttactgaagaagaagctctgaagcgcattcgttcacagtggcccagtgcggagaaagttaaacgtgcagacgctgtcatcgacaataatggcaatattgaagaaacccgccgccagctgctggacattttacaccagtgggatctgctggacaagggtggctccggccaccatcatcaccatcactaatga

SEQ ID NO: 4284 - protein, 211 aa, synthetic construct
  REGION 1..211: note = Variant of 3'O-kinase
MAVTIGLTGGIAAGKSTVSAMMRELGLPVIDADEAARAVMKPGEEAYRDIVAAFGPGILRAGGEIDRQKLGAIRFSDEQQRKVLNSIVGPAVLKKMLAEKEAHIKSGAKTVVLDIPLLFESGLQSWVDKVLVVYVDDDVQLRRLMARNGFTEEEALKRIRSQWPSAEKVKRADAVIDNNGNIEETRRQLLDILHQWDLLDKGGSGHHHHHH

SEQ ID NO: 4285 - DNA, 639 bp, synthetic construct
  misc_feature 1..639: note = Variant of 3'O-kinase
  source 1..639: mol_type = other DNA
atggcggttaccattggtttaacaggagggatcgcagcgggcaaatcgactgtgagtgccatgatgcgtgaactgggtctgccggtcatcgatgctgacgaggcagcacgcgccgttatgaagccaggcgaagaagcgtatcgcgacattgtagctgcgttcggtccgggcattcttcgtgcggatggcgagatcgatcgccagaaactgggtgctatccgcttttcggacgaacaacaacgtaaggtgctgaattcgattgtaggtcctgcagtcctgaagaagatgctcgctgagaaagaagctcatatcaagtcaggcgccaagacggttgtgctggatatcccgctgctgttcgaatccggattgcaatcgtgggtcgacaaagttctcgtggtgtacgtcgatgatgatgttcagttacgccgccttatggcacgtaacgggtttactgaagaagaagctctgatgcgcattcgttcacagtggcccagtgcggagaaagttaaacgtgcagacgctgtcatcgacaataatggcaatattgaagaaacccgccgccagctgctggacattttacaccagtgggatctgctggacaagggtggctccggccaccatcatcaccatcactaatga

SEQ ID NO: 4286 - protein, 211 aa, synthetic construct
  REGION 1..211: note = Variant of 3'O-kinase
MAVTIGLTGGIAAGKSTVSAMMRELGLPVIDADEAARAVMKPGEEAYRDIVAAFGPGILRADGEIDRQKLGAIRFSDEQQRKVLNSIVGPAVLKKMLAEKEAHIKSGAKTVVLDIPLLFESGLQSWVDKVLVVYVDDDVQLRRLMARNGFTEEEALMRIRSQWPSAEKVKRADAVIDNNGNIEETRRQLLDILHQWDLLDKGGSGHHHHHH

SEQ ID NO: 4287 - DNA, 639 bp, synthetic construct
  misc_feature 1..639: note = Variant of 3'O-kinase
  source 1..639: mol_type = other DNA
atggcggttaccattggtttaacaggagggatcgcagcgggcaaatcgactgtgagtgccatgatgcgtgaactgggtctgccggtcatcgatgctgacgaggcagcacgcgccgttatgaagccaggcgaagaagcgtatcgcgacattgtagctgcgttcggtccgggcattcttcgtgcggatggcgagatcgatcgccagaaactgggtaatatccgcttttcggacgaacaacaacgtaaggtgctgaattcgattgtaggtcctgcagtcctgaagaagatgctcgctgagaaagaagctcatatcaagtcaggcgccaagacggttgtgctggatatcccgctgctgttcgaatccggattgcaatcgtgggtcgacaaagttctcgtggtgtacgtcgatgatgatgttcagttacgccgccttatggcacgtaacgggtttactgaagaagaagctctgaagcgcattcgttcacagtggcccagtgcggagaaagttaaacgtgcagacgctgtcatcgacaataatggcaatattgaagaaacccgccgccagctgctggacattttacaccagtgggatctgctggacaagggtggctccggccaccatcatcaccatcactaatga

SEQ ID NO: 4288 - protein, 211 aa, synthetic construct
  REGION 1..211: note = Variant of 3'O-kinase
MAVTIGLTGGIAAGKSTVSAMMRELGLPVIDADEAARAVMKPGEEAYRDIVAAFGPGILRADGEIDRQKLGNIRFSDEQQRKVLNSIVGPAVLKKMLAEKEAHIKSGAKTVVLDIPLLFESGLQSWVDKVLVVYVDDDVQLRRLMARNGFTEEEALKRIRSQWPSAEKVKRADAVIDNNGNIEETRRQLLDILHQWDLLDKGGSGHHHHHH

SEQ ID NO: 4289 - DNA, 639 bp, synthetic construct
  misc_feature 1..639: note = Variant of 3'O-kinase
  source 1..639: mol_type = other DNA
atggcggttaccattggtttaacaggagggatcgcagcgggcaaatcgactgtgagtgccatgatgcgtgaactgggttttccggtcatcgatgctgacgaggcagcacgcgccgttatgaagccaggcgaagaagcgtatcgcgacattgtagctgcgttcggtccgggcattcttcgtgcggatggcgagatcgatcgccagaaactgggtgctatccgcttttcggacgaacaacaacgtaaggtgctgaattcgattgtaggtcctgcagtcctgaagaagatgctcgctgagaaagaagctcatatcaagtcaggcgccaagacggttgtgctggatatcccgctgctgttcgaatccggattgcaatcgtgggtcgacaaagttctcgtggtgtacgtcgatgatgatgttcagttacgccgccttatggcacgtaacgggtttactgaagaagaagctctgaagcgcattcgttcacagtggcccagtgcggagaaagttaaacgtgcagacgctgtcatcgacaataatggcaatattgaagaaacccgccgccagctgctggacattttacaccagtgggatctgctggacaagggtggctccggacaccatcatcaccatcactaatga

SEQ ID NO: 4290 - protein, 211 aa, synthetic construct
  REGION 1..211: note = Variant of 3'O-kinase
MAVTIGLTGGIAAGKSTVSAMMRELGFPVIDADEAARAVMKPGEEAYRDIVAAFGPGILRADGEIDRQKLGAIRFSDEQQRKVLNSIVGPAVLKKMLAEKEAHIKSGAKTVVLDIPLLFESGLQSWVDKVLVVYVDDDVQLRRLMARNGFTEEEALKRIRSQWPSAEKVKRADAVIDNNGNIEETRRQLLDILHQWDLLDKGGSGHHHHHH

SEQ ID NO: 4291 - DNA, 639 bp, synthetic construct
  misc_feature 1..639: note = Variant of 3'O-kinase
  source 1..639: mol_type = other DNA
atggcggttaccattggtttaacaggagggatcgcagcgggcaaatcgactgtgagtgccatgatgcgtgaactgggtctgccggtcatcgatgctgacgaggcagcacgcgccgttatgaagccaggcgaagaagcgtatcgcgacattgtagctgcgttcggtccgggcattcttcgtgcggatggcgagatcgatcgccagaaactgggtgctatccgcttttcggacgaacaacaacgtaaggtgctgaattcgattgtaggtcctgcagtcctgaagaagatgctcgctgagaaagaagctgttatcaagtcaggcgccaagacggttgtgctggatatcccgctgctgttcgaatccggattgcaatcgtgggtcgacaaagttctcgtggtgtacgtcgatgatgatgttcagttacgccgccttatggcacgtaacgggtttactgaagaagaagctctgaagcgcattcgttcacagtggcccagtgcggagaaagttaaacgtgcagacgctgtcatcgacaataatggcaatattgaagaaacccgccgccagctgctggacattttacaccagtgggatctgctggacaagggtggctccggccaccatcatcaccatcactaatga

SEQ ID NO: 4292 - protein, 211 aa, synthetic construct
  REGION 1..211: note = Variant of 3'O-kinase
MAVTIGLTGGIAAGKSTVSAMMRELGLPVIDADEAARAVMKPGEEAYRDIVAAFGPGILRADGEIDRQKLGAIRFSDEQQRKVLNSIVGPAVLKKMLAEKEAVIKSGAKTVVLDIPLLFESGLQSWVDKVLVVYVDDDVQLRRLMARNGFTEEEALKRIRSQWPSAEKVKRADAVIDNNGNIEETRRQLLDILHQWDLLDKGGSGHHHHHH

SEQ ID NO: 4293 - DNA, 639 bp, synthetic construct
  misc_feature 1..639: note = Variant of 3'O-kinase
  source 1..639: mol_type = other DNA
atggcggttaccattggtttaacaggagggatcgcagcgggcaaatcgactgtgagtgccatgatgcgtgaactgggtctgccggtcatcgatgctgacgaggcagcacgcgccgttatgaagccaggcgaagaagcgtatcgcgacattgtagctgcgttcggtccgggcattcttcgtgcggatggcgagatcgatcgccagaaactgggtgatatccgcttttcggacgaacaacaacgtaaggtgctgaattcgattgtaggtcctgcagtcctgaagaagatgctcgctgagaaagaagctcatatcaagtcaggcgccaagacggttgtgctggatatcccgctgctgttcgaatccggattgcaatcgtgggtcgacaaagttctcgtggtgtacgtcgatgatgatgttcagttacgccgccttatggcacgtaacgggtttactgaagaagaagctctgaagcgcattcgttcacagtggcccagtgcggagaaagttaaacgtgcagacgctgtcatcgacaataatggcaatattgaagaaacccgccgccagctgctggacattttacaccagtgggatctgctggacaagggtggctccggccaccatcatcaccatcactaatga

SEQ ID NO: 4294 - protein, 211 aa, synthetic construct
  REGION 1..211: note = Variant of 3'O-kinase
MAVTIGLTGGIAAGKSTVSAMMRELGLPVIDADEAARAVMKPGEEAYRDIVAAFGPGILRADGEIDRQKLGDIRFSDEQQRKVLNSIVGPAVLKKMLAEKEAHIKSGAKTVVLDIPLLFESGLQSWVDKVLVVYVDDDVQLRRLMARNGFTEEEALKRIRSQWPSAEKVKRADAVIDNNGNIEETRRQLLDILHQWDLLDKGGSGHHHHHH

SEQ ID NO: 4295 - DNA, 639 bp, synthetic construct
  misc_feature 1..639: note = Variant of 3'O-kinase
  source 1..639: mol_type = other DNA
atggcggttaccattggtttaacaggagggatcgcagcgggcaaatcgactgtgagtgccatgatgcgtgaactgggtctgccggtcatcgatgctgacgaggcagcacgcgccgttatgaagccaggcgaagaagcgtatcgcgacattgtagctgcgttcggtccgggcattcttcgtgcggatggcgagatcgatcgccagaaactgggtgctatccgcttttcggacgaacaacaacgtaaggtgctgaattcgattgtaggtcctgcagtcctgaagaagatgctcgctgagaaagaagctcatatcaagtcaggcgccaagacggttgtgctggatatcccggggctgttcgaatccggattgcaatcgtgggtcgacaaagttctcgtggtgtacgtcgatgatgatgttcagttacgccgccttatggcacgtaacgggtttactgaagaagaagctctgaagcgcattcgttcacagtggcccagtgcggagaaagttaaacgtgcagacgctgtcatcgacaataatggcaatattgaagaaacccgccgccagctgctggacattttacaccagtgggatctgctggacaagggtggctccggccaccatcatcaccatcactaatga

SEQ ID NO: 4296 - protein, 211 aa, synthetic construct
  REGION 1..211: note = Variant of 3'O-kinase
MAVTIGLTGGIAAGKSTVSAMMRELGLPVIDADEAARAVMKPGEEAYRDIVAAFGPGILRADGEIDRQKLGAIRFSDEQQRKVLNSIVGPAVLKKMLAEKEAHIKSGAKTVVLDIPGLFESGLQSWVDKVLVVYVDDDVQLRRLMARNGFTEEEALKRIRSQWPSAEKVKRADAVIDNNGNIEETRRQLLDILHQWDLLDKGGSGHHHHHH

SEQ ID NO: 4297 - DNA, 639 bp, synthetic construct
  misc_feature 1..639: note = Variant of 3'O-kinase
  source 1..639: mol_type = other DNA
atggcggttaccattggtttaacaggagggatcgcagcgggcaaatcgactgtgagtgccatgatgcgtgaactgggtctgccggtcatcgatgctgacgaggcagcacgcgccgttatgaagccaggcgaagaagcgtatcgcgacattgtagctgcgttcggtccgggcattcttcgtgcggatggcgagatcgatcgccagaaactgggtgctatccgcttttcggacgaacaacaacgtaaggtgctgaattcgattgtaggtcctgcagtcctgaagaagatgctcgctgagaaagaagctcatatcaagtcaggcgccaagacggttgtgctggatatcccgctgctgttcgaatccggattgcaatcgtgggtcgacaaagttctcgtggtgtacgtcgatgatgatgttcagattcgccgccttatggcacgtaacgggtttactgaagaagaagctctgaagcgcattcgttcacagtggcccagtgcggagaaagttaaacgtgcagacgctgtcatcgacaataatggcaatattgaagaaacccgccgccagctgctggacattttacaccagtgggatctgctggacaagggtggctccggccaccatcatcaccatcactaatga

SEQ ID NO: 4298 - protein, 211 aa, synthetic construct
  REGION 1..211: note = Variant of 3'O-kinase
MAVTIGLTGGIAAGKSTVSAMMRELGLPVIDADEAARAVMKPGEEAYRDIVAAFGPGILRADGEIDRQKLGAIRFSDEQQRKVLNSIVGPAVLKKMLAEKEAHIKSGAKTVVLDIPLLFESGLQSWVDKVLVVYVDDDVQIRRLMARNGFTEEEALKRIRSQWPSAEKVKRADAVIDNNGNIEETRRQLLDILHQWDLLDKGGSGHHHHHH

SEQ ID NO: 4299 - DNA, 639 bp, synthetic construct
  misc_feature 1..639: note = Variant of 3'O-kinase
  source 1..639: mol_type = other DNA
atggcggttaccattggtttaacaggagggatcgcagcgggcaaatcgactgtgagtgccatgatgcgtgaactgggtctgccggtcatcgatgctgacgaggcagcacgcgccgttatgaagccaggcgaagaagcgtatcgcgacattgtagctgcgttcggtccgggcattcttcgtgcggatggcgagatcgatcgccagaaactgggtgctatccgcttttcggacgaacaacaacgtaaggtgctgaattcgattgtaggtcctgcagtcctgaagaagatgctcgctgagaaagaagctcatatcaagtcaggcgccaagacggttgtgctggatatcccgctgctgttcgaatccggattgcaatcgtgggtcgacaaagttctcgtggtgtacgtcgatgatgatgttcagttacgccgccttatggcacgtaacgggtttactgaagaagaagctctgaagcgcattcgttcacagtggcccagtgcggagaaagttaaacgtgcagacgctgtcatcgacaataatggcaattgtgaagaaacccgccgccagctgctggacattttacaccagtgggatctgctggacaagggtggctccggccaccatcatcaccatcactaatga

SEQ ID NO: 4300 - protein, 211 aa, synthetic construct
  REGION 1..211: note = Variant of 3'O-kinase
MAVTIGLTGGIAAGKSTVSAMMRELGLPVIDADEAARAVMKPGEEAYRDIVAAFGPGILRADGEIDRQKLGAIRFSDEQQRKVLNSIVGPAVLKKMLAEKEAHIKSGAKTVVLDIPLLFESGLQSWVDKVLVVYVDDDVQLRRLMARNGFTEEEALKRIRSQWPSAEKVKRADAVIDNNGNCEETRRQLLDILHQWDLLDKGGSGHHHHHH

SEQ ID NO: 4301 - DNA, 639 bp, synthetic construct
  misc_feature 1..639: note = Variant of 3'O-kinase
  source 1..639: mol_type = other DNA
atggcggttaccattggtttaacaggagggatcgcagcgggcaaatcgactgtgagtgccatgatgcgtgaactgggtctgccggtcatcgatgctgacgaggcagcacgcgccgttatgaagccaggcgaagaagcgtatcgcgacattgtagctgcgttcggtccgggcattcttcgtgcggatggcgagatcgatcgccagaaactgggtactatccgcttttcggacgaacaacaacgtaaggtgctgaattcgattgtaggtcctgcagtcctgaagaagatgctcgctgagaaagaagctcatatcaagtcaggcgccaagacggttgtgctggatatcccgctgctgttcgaatccggattgcaatcgtgggtcgacaaagttctcgtggtgtacgtcgatgatgatgttcagttacgccgccttatggcacgtaacgggtttactgaagaagaagctctgaagcgcattcgttcacagtggcccagtgcggagaaagttaaacgtgcagacgctgtcatcgacaataatggcaatattgaagaaacccgccgccagctgctggacattttacaccagtgggatctgctggacaagggtggctccggccaccatcatcaccatcactaatga

SEQ ID NO: 4302 - protein, 211 aa, synthetic construct
  REGION 1..211: note = Variant of 3'O-kinase
MAVTIGLTGGIAAGKSTVSAMMRELGLPVIDADEAARAVMKPGEEAYRDIVAAFGPGILRADGEIDRQKLGTIRFSDEQQRKVLNSIVGPAVLKKMLAEKEAHIKSGAKTVVLDIPLLFESGLQSWVDKVLVVYVDDDVQLRRLMARNGFTEEEALKRIRSQWPSAEKVKRADAVIDNNGNIEETRRQLLDILHQWDLLDKGGSGHHHHHH

SEQ ID NO: 4303 - DNA, 639 bp, synthetic construct
  misc_feature 1..639: note = Variant of 3'O-kinase
  source 1..639: mol_type = other DNA
atggcggttaccattggtttaacaggagggatcgcagcgggcaaatcgactgtgagtgccatgatgcgtgaactgggtctgccggtcatcgatgctgacgaggcagcacgcgccgttatgaagccaggcgaagaagcgtatcgcgacattgtagctgcgttcggtccgggcattcttcgtgcggatggcgagatcgatcgccagaaactgggtaagatccgcttttcggacgaacaacaacgtaaggtgctgaattcgattgtaggtcctgcagtcctgaagaagatgctcgctgagaaagaagctcatatcaagtcaggcgccaagacggttgtgctggatatcccgctgctgttcgaatccggattgcaatcgtgggtcgacaaagttctcgtggtgtacgtcgatgatgatgttcagttacgccgccttatggcacgtaacgggtttactgaagaagaagctctgaagcgcattcgttcacagtggcccagtgcggagaaagttaaacgtgcagacgctgtcatcgacaataatggcaatattgaagaaacccgccgccagctgctggacattttacaccagtgggatctgctggacaagggtggctccggccaccatcatcaccatcactaatga

SEQ ID NO: 4304 - protein, 211 aa, synthetic construct
  REGION 1..211: note = Variant of 3'O-kinase
MAVTIGLTGGIAAGKSTVSAMMRELGLPVIDADEAARAVMKPGEEAYRDIVAAFGPGILRADGEIDRQKLGKIRFSDEQQRKVLNSIVGPAVLKKMLAEKEAHIKSGAKTVVLDIPLLFESGLQSWVDKVLVVYVDDDVQLRRLMARNGFTEEEALKRIRSQWPSAEKVKRADAVIDNNGNIEETRRQLLDILHQWDLLDKGGSGHHHHHH

SEQ ID NO: 4305 - DNA, 639 bp, synthetic construct
  misc_feature 1..639: note = Variant of 3'O-kinase
  source 1..639: mol_type = other DNA
atggcggttaccattggtttaacaggagggatcgcagcgggcaaatcgactgtgagtgccatgatgcgtgaactgggtctgccggtcatcgatgctgacgaggcagcacgcgccgttatgaagccaggcgaagaagcgtatcgcgacattgtagctgcgttcggtccgggcattcttcgtgcggatggcgagatcgatcgccagaaactgggtgctatccgcttttcggacgaacaacaacgtaaggtgctgaattcgattgtaggtcctgcagtcctgaagaagatgctcgctgagaaagaagctcatatcaagtcaggcgccaagacggttgtgctggatatcccgctgctgttcgaatccggattgcaatcgtgggtcgacaaagttctcgtggtgtacgtcgatgatgatgttcagttacgccgccttatggcacgtaacgggcttactgaagaagaagctctgaagcgcattcgttcacagtggcccagtgcggagaaagttaaacgtgcagacgctgtcatcgacaataatggcaatattgaagaaacccgccgccagctgctggacattttacaccagtgggatctgctggacaagggtggctccggccaccatcatcaccatcactaatga

SEQ ID NO: 4306 - protein, 211 aa, synthetic construct
  REGION 1..211: note = Variant of 3'O-kinase
MAVTIGLTGGIAAGKSTVSAMMRELGLPVIDADEAARAVMKPGEEAYRDIVAAFGPGILRADGEIDRQKLGAIRFSDEQQRKVLNSIVGPAVLKKMLAEKEAHIKSGAKTVVLDIPLLFESGLQSWVDKVLVVYVDDDVQLRRLMARNGLTEEEALKRIRSQWPSAEKVKRADAVIDNNGNIEETRRQLLDILHQWDLLDKGGSGHHHHHH

SEQ ID NO: 4307 - DNA, 639 bp, synthetic construct
  misc_feature 1..639: note = Variant of 3'O-kinase
  source 1..639: mol_type = other DNA
atggcggttaccattggtttaacaggagggatcgcagcgggcaaatcgactgtgagtgccatgatgcgtgaactgggtctgccggtcatcgatgctgacgaggcagcacgcgccgttatgaagccaggcgaagaagcgtatcgcgacattgtagctgcgttcggtccgggcattcttcgtgcggatggcgagatcgatcgccagaaactgggtgctatcggtttttcggacgaacaacaacgtaaggtgctgaattcgattgtaggtcctgcagtcctgaagaagatgctcgctgagaaagaagctcatatcaagtcaggcgccaagacggttgtgctggatatcccgctgctgttcgaatccggattgcaatcgtgggtcgacaaagttctcgtggtgtacgtcgatgatgatgttcagttacgccgccttatggcacgtaacgggtttactgaagaagaagctctgaagcgcattcgttcacagtggcccagtgcggagaaagttaaacgtgcagacgctgtcatcgacaataatggcaatattgaagaaacccgccgccagctgctggacattttacaccagtgggatctgctggacaagggtggctccggccaccatcatcaccatcactaatga

SEQ ID NO: 4308 - protein, 211 aa, synthetic construct
  REGION 1..211: note = Variant of 3'O-kinase
MAVTIGLTGGIAAGKSTVSAMMRELGLPVIDADEAARAVMKPGEEAYRDIVAAFGPGILRADGEIDRQKLGAIGFSDEQQRKVLNSIVGPAVLKKMLAEKEAHIKSGAKTVVLDIPLLFESGLQSWVDKVLVVYVDDDVQLRRLMARNGFTEEEALKRIRSQWPSAEKVKRADAVIDNNGNIEETRRQLLDILHQWDLLDKGGSGHHHHHH

SEQ ID NO: 4309 - DNA, 639 bp, synthetic construct
  misc_feature 1..639: note = Variant of 3'O-kinase
  source 1..639: mol_type = other DNA
atggcggttaccattggtttaacaggagggatcgcagcgggcaaatcgactgtgagtgccatgatgcgtgaactgggtctgccggtcatcgatgctgacgaggcagcacgcgccgttatgaagccaggcgaagaagcgtatcgcgacattgtagctgcgttcggtccgggcattcttcgtgcggatggcgagatcgatcgccagaaactgggtgctatccgcttttcggacgaacaacaacgtaaggtgctgaattcgattgtaggtcctgcagtcctgaagaagatgctcgctgagaaagaagctatgatcaagtcaggcgccaagacggttgtgctggatatcccgctgctgttcgaatccggattgcaatcgtgggtcgacaaagttctcgtggtgtacgtcgatgatgatgttcagttacgccgccttatggcacgtaacgggtttactgaagaagaagctctgaagcgcattcgttcacagtggcccagtgcggagaaagttaaacgtgcagacgctgtcatcgacaataatggcaatattgaagaaacccgccgccagctgctggacattttacaccagtgggatctgctggacaagggtggctccggccaccatcatcaccatcactaatga

SEQ ID NO: 4310 - protein, 211 aa, synthetic construct
  REGION 1..211: note = Variant of 3'O-kinase
MAVTIGLTGGIAAGKSTVSAMMRELGLPVIDADEAARAVMKPGEEAYRDIVAAFGPGILRADGEIDRQKLGAIRFSDEQQRKVLNSIVGPAVLKKMLAEKEAMIKSGAKTVVLDIPLLFESGLQSWVDKVLVVYVDDDVQLRRLMARNGFTEEEALKRIRSQWPSAEKVKRADAVIDNNGNIEETRRQLLDILHQWDLLDKGGSGHHHHHH

SEQ ID NO: 4311 - DNA, 639 bp, synthetic construct
  misc_feature 1..639: note = Variant of 3'O-kinase
  source 1..639: mol_type = other DNA
atggcggttaccattggtttaacaggagggatcgcagcgggcaaatcgactgtgagtgccatgatgcgtgaactgggtctgccggtcatcgatgctgacgaggcagcacgcgccgttatgaagccaggcgaagaagcgtatcgcgacattgtagctgcgttcggtccgggcattcttcgtgcggatggcgagatcgatcgccagaaactgggtgctatccgcttttcggacgaacaacaacgtaaggtgctgaattcgattgtaggtcctgcagtcctgaagaagatgctcgctgagaaagaagctcatatcaagtcaggcgccaagacggttgtgctggatatcccgctgctgttcgaatccggattgcaatcgtgggtcgacaaagttctcgtggtgtacgtcgatgatgatgttcagttacgccgccttatggcacgtaacgggtttactgaagaagaagctctgaagcgcattgattcacagtggcccagtgcggagaaagttaaacgtgcagacgctgtcatcgacaataatggcaatattgaagaaacccgccgccagctgctggacattttacaccagtgggatctgctggacaagggtggctccggccaccatcatcaccatcactaatga

SEQ ID NO: 4312 - protein, 211 aa, synthetic construct
  REGION 1..211: note = Variant of 3'O-kinase
MAVTIGLTGGIAAGKSTVSAMMRELGLPVIDADEAARAVMKPGEEAYRDIVAAFGPGILRADGEIDRQKLGAIRFSDEQQRKVLNSIVGPAVLKKMLAEKEAHIKSGAKTVVLDIPLLFESGLQSWVDKVLVVYVDDDVQLRRLMARNGFTEEEALKRIDSQWPSAEKVKRADAVIDNNGNIEETRRQLLDILHQWDLLDKGGSGHHHHHH

SEQ ID NO: 4313 - DNA, 639 bp, synthetic construct
  misc_feature 1..639: note = Variant of 3'O-kinase
  source 1..639: mol_type = other DNA
atggcggttaccattggtttaacaggagggatcgcagcgggcaaatcgactgtgagtgccatgatgcgtgaactgggtctgccggtcatcgatgctgacgaggcagcacgcgccgttatgaagccaggcgaagaagcgtatcgcgacattgtagctgcgttcggtccgggcattcttcgtgcggatggcgagatcgattttcagaaactgggtgctatccgcttttcggacgaacaacaacgtaaggtgctgaattcgattgtaggtcctgcagtcctgaagaagatgctcgctgagaaagaagctcatatcaagtcaggcgccaagacggttgtgctggatatcccgctgctgttcgaatccggattgcaatcgtgggtcgacaaagttctcgtggtgtacgtcgatgatgatgttcagttacgccgccttatggcacgtaacgggtttactgaagaagaagctctgaagcgcattcgttcacagtggcccagtgcggagaaagttaaacgtgcagacgctgtcatcgacaataatggcaatattgaagaaacccgccgccagctgctggacattttacaccagtgggatctgctggacaagggtggctccggccaccatcatcaccatcactaatga

SEQ ID NO: 4314 - protein, 211 aa, synthetic construct
  REGION 1..211: note = Variant of 3'O-kinase
MAVTIGLTGGIAAGKSTVSAMMRELGLPVIDADEAARAVMKPGEEAYRDIVAAFGPGILRADGEIDFQKLGAIRFSDEQQRKVLNSIVGPAVLKKMLAEKEAHIKSGAKTVVLDIPLLFESGLQSWVDKVLVVYVDDDVQLRRLMARNGFTEEEALKRIRSQWPSAEKVKRADAVIDNNGNIEETRRQLLDILHQWDLLDKGGSGHHHHHH

SEQ ID NO: 4315 - DNA, 639 bp, synthetic construct
  misc_feature 1..639: note = Variant of 3'O-kinase
  source 1..639: mol_type = other DNA
atggcggttaccattggtttaacaggagggatcgcagcgggcaaatcgactgtgagtgccatgatgcgtgaactgggtctgccggtcatcgatgctgacgaggcagcacgcgccgttatgaagccaggcgaagaagcgtatcgcgacattgtagctgcgttcggtccgggcattcttcgtgcggatggcgagatcgatcgccagaaactgggtgctatccgcttttcggacgaacaacaacgtaaggtgctgaattcgattgtaggtcctgcagtcctgaagaagatgctcgctgagaaagaagctcatatcaagtcaggcgccaagacggttgtgctggatatcccgctgctgttcgaatccggattgcaatcgtgggtcgacaaagttctcgtggtgcatgtcgatgatgatgttcagttacgccgccttatggcacgtaacgggtttactgaagaagaagctctgaagcgcattcgttcacagtggcccagtgcggagaaagttaaacgtgcagacgctgtcatcgacaataatggcaatattgaagaaacccgccgccagctgctggacattttacaccagtgggatctgctggacaagggtggctccggccaccatcatcaccatcactaatga

SEQ ID NO: 4316 - protein, 211 aa, synthetic construct
  REGION 1..211: note = Variant of 3'O-kinase
MAVTIGLTGGIAAGKSTVSAMMRELGLPVIDADEAARAVMKPGEEAYRDIVAAFGPGILRADGEIDRQKLGAIRFSDEQQRKVLNSIVGPAVLKKMLAEKEAHIKSGAKTVVLDIPLLFESGLQSWVDKVLVVHVDDDVQLRRLMARNGFTEEEALKRIRSQWPSAEKVKRADAVIDNNGNIEETRRQLLDILHQWDLLDKGGSGHHHHHH

SEQ ID NO: 4317 - DNA, 639 bp, synthetic construct
  misc_feature 1..639: note = Variant of 3'O-kinase
  source 1..639: mol_type = other DNA
atggcggttaccattggtttaacaggagggatcgcagcgggcaaatcgactgtgagtgccatgatgcgtgaactgggttatccggtcatcgatgctgacgaggcagcacgcgccgttatgaagccaggcgaagaagcgtatcgcgacattgtagctgcgttcggtccgggcattcttcgtgcggatggcgagatcgatcgccagaaactgggtgctatccgcttttcggacgaacaacaacgtaaggtgctgaattcgattgtaggtcctgcagtcctgaagaagatgctcgctgagaaagaagctcatatcaagtcaggcgccaagacggttgtgctggatatcccgctgctgttcgaatccggattgcaatcgtgggtcgacaaagttctcgtggtgtacgtcgatgatgatgttcagttacgccgccttatggcacgtaacgggtttactgaagaagaagctctgaagcgcattcgttcacagtggcccagtgcggagaaagttaaacgtgcagacgctgtcatcgacaataatggcaatattgaagaaacccgccgccagctgctggacattttacaccagtgggatctgctggacaagggtggctccggccaccatcatcaccatcactaatga

SEQ ID NO: 4318 - protein, 211 aa, synthetic construct
  REGION 1..211: note = Variant of 3'O-kinase
MAVTIGLTGGIAAGKSTVSAMMRELGYPVIDADEAARAVMKPGEEAYRDIVAAFGPGILRADGEIDRQKLGAIRFSDEQQRKVLNSIVGPAVLKKMLAEKEAHIKSGAKTVVLDIPLLFESGLQSWVDKVLVVYVDDDVQLRRLMARNGFTEEEALKRIRSQWPSAEKVKRADAVIDNNGNIEETRRQLLDILHQWDLLDKGGSGHHHHHH

SEQ ID NO: 4319 - DNA, 639 bp, synthetic construct
  misc_feature 1..639: note = Variant of 3'O-kinase
  source 1..639: mol_type = other DNA
atggcggttaccattggtttaacaggagggatcgcagcgggcaaatcgactgtgagtgccatgatgcgtgaactgggtctgccggtcatcgatgctgacgaggcagcacgcgccgttatgaagccaggcgaagaagcgtatcgcgacattgtagctgcgttcggtccgggcattcttcgtgcggatggcgagatcgatcgccagaaactgggtgctatccgcttttcggacgaacaacaacgtaaggtgctgaattcgattgtaggtcctgcagtcctgaagaagatgctcgctgagaaagaagctcatatcaagtcaggcgccaagacggttgtgctggatatcccgctgctgttcgaatccggattgcaatcgtgggtcgacaaagttctcgtggtgtacgtcgatgatgatgttcagttacgccgccttatggcacgtaacgggtttactgaagaagaagctctgaagcgcattcgttcacagtggcccagtgaggagaaagttaaacgtgcagacgctgtcatcgacaataatggcaatattgaagaaacccgccgccagctgctggacattttacaccagtgggatctgctggacaagggtggctccggccaccatcatcaccatcactaatga

SEQ ID NO: 4320 - protein, 211 aa, synthetic construct
  REGION 1..211: note = Variant of 3'O-kinase
MAVTIGLTGGIAAGKSTVSAMMRELGLPVIDADEAARAVMKPGEEAYRDIVAAFGPGILRADGEIDRQKLGAIRFSDEQQRKVLNSIVGPAVLKKMLAEKEAHIKSGAKTVVLDIPLLFESGLQSWVDKVLVVYVDDDVQLRRLMARNGFTEEEALKRIRSQWPSEEKVKRADAVIDNNGNIEETRRQLLDILHQWDLLDKGGSGHHHHHH

SEQ ID NO: 4321 - DNA, 639 bp, synthetic construct
  misc_feature 1..639: note = Variant of 3'O-kinase
  source 1..639: mol_type = other DNA
atggcggttaccattggtttaacaggagggatcgcagcgggcaaatcgactgtgagtgccatgatgcgtgaactgggtctgccggtcatcgatgctgacgaggcagcacgcgccgttatgaagccaggcgaagaagcgtatcgcgacattgtagctgcgttcggtccgggcattcttcgtgcggatggcgagatcgatcgccagaaactgggtgctatccgcttttcggacgaacaacaacgtaaggtgctgaattcgattgtaggtcctgcagtcctgaagaagatgctcgctgagaaagaagctcatatcaagtcaggcgccaagacggttgtgctggatatcccgctgctgttcgaatccggattgcaatcgtgggtcgacaaagttctcgtggtgtacgtcgatgatgatgttcagttacgccgccttatggcacgtaacgggtttactgaagaagaagctctgaagcgcattcgttcacagtggcccagtcttgagaaagttaaacgtgcagacgctgtcatcgacaataatggcaatattgaagaaacccgccgccagctgctggacattttacaccagtgggatctgctggacaagggtggctccggccaccatcatcaccatcactaatga

SEQ ID NO: 4322 - protein, 211 aa, synthetic construct
  REGION 1..211: note = Variant of 3'O-kinase
MAVTIGLTGGIAAGKSTVSAMMRELGLPVIDADEAARAVMKPGEEAYRDIVAAFGPGILRADGEIDRQKLGAIRFSDEQQRKVLNSIVGPAVLKKMLAEKEAHIKSGAKTVVLDIPLLFESGLQSWVDKVLVVYVDDDVQLRRLMARNGFTEEEALKRIRSQWPSLEKVKRADAVIDNNGNIEETRRQLLDILHQWDLLDKGGSGHHHHHH

SEQ ID NO: 4323 - DNA, 639 bp, synthetic construct
  misc_feature 1..639: note = Variant of 3'O-kinase
  source 1..639: mol_type = other DNA
atggcggttaccattggtttaacaggagggatcgcagcgggcaaatcgactgtgagtgccatgatgcgtgaactgggtctgccggtcatcgatgctgacgaggcagcacgcgccgttatgaagccaggcgaagaagcgtatcgcgacattgtagctgcgttcggtccgggcattcttcgtgcggatggcgagatcgatcgccagaaactgggtgctatccgcttttcggacgaacaacaacgtaaggtgctgaattcgattgtaggtcctgcagtcctgaagaagatgctcgctgagaaagaagctcatatcaagtcaggcgccaagacggttgtgctggatatcccgctgctgttcgaatccggattgcaatcgtgggtcgacaaagttctcgtggtgtacgtcgatgatgatgttcagttacgccgccttatggcacgtaacgggtttactgaagaagaagctctggagcgcattcgttcacagtggcccagtgcggagaaagttaaacgtgcagacgctgtcatcgacaataatggcaatattgaagaaacccgccgccagctgctggacattttacaccagtgggatctgctggacaagggtggctccggccaccatcatcaccatcactaatga

SEQ ID NO: 4324 - protein, 211 aa, synthetic construct
  REGION 1..211: note = Variant of 3'O-kinase
MAVTIGLTGGIAAGKSTVSAMMRELGLPVIDADEAARAVMKPGEEAYRDIVAAFGPGILRADGEIDRQKLGAIRFSDEQQRKVLNSIVGPAVLKKMLAEKEAHIKSGAKTVVLDIPLLFESGLQSWVDKVLVVYVDDDVQLRRLMARNGFTEEEALERIRSQWPSAEKVKRADAVIDNNGNIEETRRQLLDILHQWDLLDKGGSGHHHHHH

SEQ ID NO: 4325 - DNA, 639 bp, synthetic construct
  misc_feature 1..639: note = Variant of 3'O-kinase
  source 1..639: mol_type = other DNA
atggcggttaccattggtttaacaggagggatcgcagcgggcaaatcgactgtgagtgccatgatgcgtgaactgggtctgccggtcatcgatgctgacgaggcagcacgcgccgttatgaagccaggcgaagaagcgtatcgcgacattgtagctgcgttcggtccgggcattcttcgtgcggatggcgagatcgatcgccagaaactgggtgctatctgtttttcggacgaacaacaacgtaaggtgctgaattcgattgtaggtcctgcagtcctgaagaagatgctcgctgagaaagaagctcatatcaagtcaggcgccaagacggttgtgctggatatcccgctgctgttcgaatccggattgcaatcgtgggtcgacaaagttctcgtggtgtacgtcgatgatgatgttcagttacgccgccttatggcacgtaacgggtttactgaagaagaagctctgaagcgcattcgttcacagtggcccagtgcggagaaagttaaacgtgcagacgctgtcatcgacaataatggcaatattgaagaaacccgccgccagctgctggacattttacaccagtgggatctgctggacaagggtggctccggccaccatcatcaccatcactaatga

SEQ ID NO: 4326 - protein, 211 aa, synthetic construct
  REGION 1..211: note = Variant of 3'O-kinase
MAVTIGLTGGIAAGKSTVSAMMRELGLPVIDADEAARAVMKPGEEAYRDIVAAFGPGILRADGEIDRQKLGAICFSDEQQRKVLNSIVGPAVLKKMLAEKEAHIKSGAKTVVLDIPLLFESGLQSWVDKVLVVYVDDDVQLRRLMARNGFTEEEALKRIRSQWPSAEKVKRADAVIDNNGNIEETRRQLLDILHQWDLLDKGGSGHHHHHH

SEQ ID NO: 4327 - DNA, 639 bp, synthetic construct
  misc_feature 1..639: note = Variant of 3'O-kinase
  source 1..639: mol_type = other DNA
atggcggttaccattggtttaacaggagggatcgcagcgggcaaatcgactgtgagtgccatgatgcgtgaactgggtctgccggtcatcgatgctgacgaggcagcacgcgccgttatgaagccaggcgaagaagcgtatcgcgacattgtagctgcgttcggtccgggcattcttcgtgcggatggcgagatcgatcgccagaaactgggtgctatcgtgttttcggacgaacaacaacgtaaggtgctgaattcgattgtaggtcctgcagtcctgaagaagatgctcgctgagaaagaagctcatatcaagtcaggcgccaagacggttgtgctggatatcccgctgctgttcgaatccggattgcaatcgtgggtcgacaaagttctcgtggtgtacgtcgatgatgatgttcagttacgccgccttatggcacgtaacgggtttactgaagaagaagctctgaagcgcattcgttcacagtggcccagtgcggagaaagttaaacgtgcagacgctgtcatcgacaataatggcaatattgaagaaacccgccgccagctgctggacattttacaccagtgggatctgctggacaagggtggctccggccaccatcatcaccatcactaatga

SEQ ID NO: 4328 - protein, 211 aa, synthetic construct
  REGION 1..211: note = Variant of 3'O-kinase
MAVTIGLTGGIAAGKSTVSAMMRELGLPVIDADEAARAVMKPGEEAYRDIVAAFGPGILRADGEIDRQKLGAIVFSDEQQRKVLNSIVGPAVLKKMLAEKEAHIKSGAKTVVLDIPLLFESGLQSWVDKVLVVYVDDDVQLRRLMARNGFTEEEALKRIRSQWPSAEKVKRADAVIDNNGNIEETRRQLLDILHQWDLLDKGGSGHHHHHH

SEQ ID NO: 4329 - DNA, 639 bp, synthetic construct
  misc_feature 1..639: note = Variant of 3'O-kinase
  source 1..639: mol_type = other DNA
atggcggttaccattggtttaacaggagggatcgcagcgggcaaatcgactgtgagtgccatgatgcgtgaactgggtctgccggtcatcgatgctgacgaggcagcacgcgccgttatgaagccaggcgaagaagcgtatcgcgacattgtagctgcgttcggtccgggcattcttcgtgcggatggcgagatcgatcgccagaaactgggtgctatcgctttttcggacgaacaacaacgtaaggtgctgaattcgattgtaggtcctgcagtcctgaagaagatgctcgctgagaaagaagctcatatcaagtcaggcgccaagacggttgtgctggatatcccgctgctgttcgaatccggattgcaatcgtgggtcgacaaagttctcgtggtgtacgtcgatgatgatgttcagttacgccgccttatggcacgtaacgggtttactgaagaagaagctctgaagcgcattcgttcacagtggcccagtgcggagaaagttaaacgtgcagacgctgtcatcgacaataatggcaatattgaagaaacccgccgccagctgctggacattttacaccagtgggatctgctggacaagggtggctccggccaccatcatcaccatcactaatga

SEQ ID NO: 4330 - protein, 211 aa, synthetic construct
  REGION 1..211: note = Variant of 3'O-kinase
MAVTIGLTGGIAAGKSTVSAMMRELGLPVIDADEAARAVMKPGEEAYRDIVAAFGPGILRADGEIDRQKLGAIAFSDEQQRKVLNSIVGPAVLKKMLAEKEAHIKSGAKTVVLDIPLLFESGLQSWVDKVLVVYVDDDVQLRRLMARNGFTEEEALKRIRSQWPSAEKVKRADAVIDNNGNIEETRRQLLDILHQWDLLDKGGSGHHHHHH

SEQ ID NO: 4331 - DNA, 639 bp, synthetic construct
  misc_feature 1..639: note = Variant of 3'O-kinase
  source 1..639: mol_type = other DNA
atggcggttaccattggtttaacaggagggatcgcagcgggcaaatcgactgtgagtgccatgatgcgtgaactgggtctgccggtcatcgatgctgacgaggcagcacgcgccgttatgaagccaggcgaagaagcgtatcgcgacattgtagctgcgttcggtccgggcattcttcgtgcggatggcgagatcgatcgccagaaactgcaggctatccgcttttcggacgaacaacaacgtaaggtgctgaattcgattgtaggtcctgcagtcctgaagaagatgctcgctgagaaagaagctcatatcaagtcaggcgccaagacggttgtgctggatatcccgctgctgttcgaatccggattgcaatcgtgggtcgacaaagttctcgtggtgtacgtcgatgatgatgttcagttacgccgccttatggcacgtaacgggtttactgaagaagaagctctgaagcgcattcgttcacagtggcccagtgcggagaaagttaaacgtgcagacgctgtcatcgacaataatggcaatattgaagaaacccgccgccagctgctggacattttacaccagtgggatctgctggacaagggtggctccggccaccatcatcaccatcactaatga

SEQ ID NO: 4332 - protein, 211 aa, synthetic construct
  REGION 1..211: note = Variant of 3'O-kinase
MAVTIGLTGGIAAGKSTVSAMMRELGLPVIDADEAARAVMKPGEEAYRDIVAAFGPGILRADGEIDRQKLQAIRFSDEQQRKVLNSIVGPAVLKKMLAEKEAHIKSGAKTVVLDIPLLFESGLQSWVDKVLVVYVDDDVQLRRLMARNGFTEEEALKRIRSQWPSAEKVKRADAVIDNNGNIEETRRQLLDILHQWDLLDKGGSGHHHHHH

SEQ ID NO: 4333 - DNA, 639 bp, synthetic construct
  misc_feature 1..639: note = Variant of 3'O-kinase
  source 1..639: mol_type = other DNA
atggcggttaccattggtttaacaggagggatcgcagcgggcaaatcgactgtgagtgccatgatgcgtgaactgggtctgccggtcatcgatgctgacgaggcagcacgcgccgttatgaagccaggcgaagaagcgtatcgcgacattgtagctgcgttcggtccgggcattcttcgtgcggatggcgagatcgatcgccagaaactgggtgctatccgcttttcggacgaacaacaacgtaaggtgctgaattcgattgtaggtcctgcagtcctgaagaagatgctcgctgagaaagaagctcttatcaagtcaggcgccaagacggttgtgctggatatcccgctgctgttcgaatccggattgcaatcgtgggtcgacaaagttctcgtggtgtacgtcgatgatgatgttcagttacgccgccttatggcacgtaacgggtttactgaagaagaagctctgaagcgcattcgttcacagtggcccagtgcggagaaagttaaacgtgcagacgctgtcatcgacaataatggcaatattgaagaaacccgccgccagctgctggacattttacaccagtgggatctgctggacaagggtggctccggccaccatcatcaccatcactaatga

SEQ ID NO: 4334 - protein, 211 aa, synthetic construct
  REGION 1..211: note = Variant of 3'O-kinase
MAVTIGLTGGIAAGKSTVSAMMRELGLPVIDADEAARAVMKPGEEAYRDIVAAFGPGILRADGEIDRQKLGAIRFSDEQQRKVLNSIVGPAVLKKMLAEKEALIKSGAKTVVLDIPLLFESGLQSWVDKVLVVYVDDDVQLRRLMARNGFTEEEALKRIRSQWPSAEKVKRADAVIDNNGNIEETRRQLLDILHQWDLLDKGGSGHHHHHH

SEQ ID NO: 4335 - DNA, 639 bp, synthetic construct
  misc_feature 1..639: note = Variant of 3'O-kinase
  source 1..639: mol_type = other DNA
atggcggttaccattggtttaacaggagggatcgcagcgggcaaatcgactgtgagtgccatgatgcgtgaactgggtctgccggtcatcgatgctgacgaggcagcacgcgccgttatgaagccaggcgaagaagcgtatcgcgacattgtagctgcgttcggtccgggcattcttcgtgcggatggcgagatcgatcgcgggaaactgggtgctatccgcttttcggacgaacaacaacgtaaggtgctgaattcgattgtaggtcctgcagtcctgaagaagatgctcgctgagaaagaagctcatatcaagtcaggcgccaagacggttgtgctggatatcccgctgctgttcgaatccggattgcaatcgtgggtcgacaaagttctcgtggtgtacgtcgatgatgatgttcagttacgccgccttatggcacgtaacgggtttactgaagaagaagctctgaagcgcattcgttcacagtggcccagtgcggagaaagttaaacgtgcagacgctgtcatcgacaataatggcaatattgaagaaacccgccgccagctgctggacattttacaccagtgggatctgctggacaagggtggctccggccaccatcatcaccatcactaatga

SEQ ID NO: 4336 - protein, 211 aa, synthetic construct
  REGION 1..211: note = Variant of 3'O-kinase
MAVTIGLTGGIAAGKSTVSAMMRELGLPVIDADEAARAVMKPGEEAYRDIVAAFGPGILRADGEIDRGKLGAIRFSDEQQRKVLNSIVGPAVLKKMLAEKEAHIKSGAKTVVLDIPLLFESGLQSWVDKVLVVYVDDDVQLRRLMARNGFTEEEALKRIRSQWPSAEKVKRADAVIDNNGNIEETRRQLLDILHQWDLLDKGGSGHHHHHH

SEQ ID NO: 4337 - DNA, 639 bp, synthetic construct
  misc_feature 1..639: note = Variant of 3'O-kinase
  source 1..639: mol_type = other DNA
atggcggttaccattggtttaacaggagggatcgcagcgggcaaatcgactgtgagtactatgatgcgtgaactgggtctgccggtcatcgatgctgacgaggcagcacgcgccgttatgaagccaggcgaagaagcgtatcgcgacattgtagctgcgttcggtccgggcattcttcgtgcggatggcgagatcgatcgccagaaactgggtgctatccgcttttcggacgaacaacaacgtaaggtgctgaattcgattgtaggtcctgcagtcctgaagaagatgctcgctgagaaagaagctcatatcaagtcaggcgccaagacggttgtgctggatatcccgctgctgttcgaatccggattgcaatcgtgggtcgacaaagttctcgtggtgtacgtcgatgatgatgttcagttacgccgccttatggcacgtaacgggtttactgaagaagaagctctgaagcgcattcgttcacagtggcccagtgcggagaaagttaaacgtgcagacgctgtcatcgacaataatggcaatattgaagaaacccgccgccagctgctggacattttacaccagtgggatctgctggacaagggtggctccggccaccatcatcaccatcactaatga

SEQ ID NO: 4338 - protein, 211 aa, synthetic construct
  REGION 1..211: note = Variant of 3'O-kinase
MAVTIGLTGGIAAGKSTVSTMMRELGLPVIDADEAARAVMKPGEEAYRDIVAAFGPGILRADGEIDRQKLGAIRFSDEQQRKVLNSIVGPAVLKKMLAEKEAHIKSGAKTVVLDIPLLFESGLQSWVDKVLVVYVDDDVQLRRLMARNGFTEEEALKRIRSQWPSAEKVKRADAVIDNNGNIEETRRQLLDILHQWDLLDKGGSGHHHHHH

SEQ ID NO: 4339 - DNA, 639 bp, synthetic construct
  misc_feature 1..639: note = Variant of 3'O-kinase
  source 1..639: mol_type = other DNA
atggcggttaccattggtttaacaggagggatcgcagcgggcaaatcgactgtgagtgccatgatgcgtgaactgggtctgccggtcatcgatgctgacgaggcagcacgcgccgttatgaagccaggcgaagaagcgtatcgcgacattgtagctgcgttcggtccgggcattcttcgtgcggatggcgagatcgatcgccagaaactgggtgctatccgcttttcggacgaacaacaacgtaaggtgctgaattcgattgtaggtcctgcagtcctgaagaagatgctcgctgagaaagaagctcatatcaagtcaggcgccaagacggttgtgctggatatcccgctgctgttcgaatccggattgtattcgtgggtcgacaaagttctcgtggtgtacgtcgatgatgatgttcagttacgccgccttatggcacgtaacgggtttactgaagaagaagctctgaagcgcattcgttcacagtggcccagtgcggagaaagttaaacgtgcagacgctgtcatcgacaataatggcaatattgaagaaacccgccgccagctgctggacattttacaccagtgggatctgctggacaagggtggctccggccaccatcatcaccatcactaatga

SEQ ID NO: 4340 - protein, 211 aa, synthetic construct
  REGION 1..211: note = Variant of 3'O-kinase
MAVTIGLTGGIAAGKSTVSAMMRELGLPVIDADEAARAVMKPGEEAYRDIVAAFGPGILRADGEIDRQKLGAIRFSDEQQRKVLNSIVGPAVLKKMLAEKEAHIKSGAKTVVLDIPLLFESGLYSWVDKVLVVYVDDDVQLRRLMARNGFTEEEALKRIRSQWPSAEKVKRADAVIDNNGNIEETRRQLLDILHQWDLLDKGGSGHHHHHH

SEQ ID NO: 4341 - DNA, 639 bp, synthetic construct
  misc_feature 1..639: note = Variant of 3'O-kinase
  source 1..639: mol_type = other DNA
atggcggttaccattggtttaacaggagggatcgcagcgggcaaatcgactgtgagtgccatgatgcgtgaactgggtctgccggtcatcgatgctgacgaggcagcacgcgccgttatgaagccaggcgaagaagcgtatcgcgacattgtagctgcgttcggtccgggcattcttcgtgcggatggcgagatcgatcgccagaaactgggtgctatccgcttttcggacgaacaacaacgtaaggtgctgaattcgattgtaggtcctgcagtcctgaagaagattctcgctgagaaagaagctcatatcaagtcaggcgccaagacggttgtgctggatatcccgctgctgttcgaatccggattgcaatcgtgggtcgacaaagttctcgtggtgtacgtcgatgatgatgttcagttacgccgccttatggcacgtaacgggtttactgaagaagaagctctgaagcgcattcgttcacagtggcccagtgcggagaaagttaaacgtgcagacgctgtcatcgacaataatggcaatattgaagaaacccgccgccagctgctggacattttacaccagtgggatctgctggacaagggtggctccggccaccatcatcaccatcactaatga

SEQ ID NO: 4342 - protein, 211 aa, synthetic construct
  REGION 1..211: note = Variant of 3'O-kinase
MAVTIGLTGGIAAGKSTVSAMMRELGLPVIDADEAARAVMKPGEEAYRDIVAAFGPGILRADGEIDRQKLGAIRFSDEQQRKVLNSIVGPAVLKKILAEKEAHIKSGAKTVVLDIPLLFESGLQSWVDKVLVVYVDDDVQLRRLMARNGFTEEEALKRIRSQWPSAEKVKRADAVIDNNGNIEETRRQLLDILHQWDLLDKGGSGHHHHHH

SEQ ID NO: 4343 - DNA, 639 bp, synthetic construct
  misc_feature 1..639: note = Variant of 3'O-kinase
  source 1..639: mol_type = other DNA
atggcggttaccattggtttaacaggagggatcgcagcgggcaaatcgactgtgagtgccatgatgcgtgaactgggtctgccggtcatcgatgctgacgaggcagcacgcgccgttatgaagccaggcgaagaagcgtatcgcgacattgtagctgcgttcggtccgggcattcttcgtgcggatggcgagatcgatcgccagaaactgcgtgctatccgcttttcggacgaacaacaacgtaaggtgctgaattcgattgtaggtcctgcagtcctgaagaagatgctcgctgagaaagaagctcatatcaagtcaggcgccaagacggttgtgctggatatcccgctgctgttcgaatccggattgcaatcgtgggtcgacaaagttctcgtggtgtacgtcgatgatgatgttcagttacgccgccttatggcacgtaacgggtttactgaagaagaagctctgaagcgcattcgttcacagtggcccagtgcggagaaagttaaacgtgcagacgctgtcatcgacaataatggcaatattgaagaaacccgccgccagctgctggacattttacaccagtgggatctgctggacaagggtggctccggccaccatcatcaccatcactaatga

SEQ ID NO: 4344 - protein, 211 aa, synthetic construct
  REGION 1..211: note = Variant of 3'O-kinase
MAVTIGLTGGIAAGKSTVSAMMRELGLPVIDADEAARAVMKPGEEAYRDIVAAFGPGILRADGEIDRQKLRAIRFSDEQQRKVLNSIVGPAVLKKMLAEKEAHIKSGAKTVVLDIPLLFESGLQSWVDKVLVVYVDDDVQLRRLMARNGFTEEEALKRIRSQWPSAEKVKRADAVIDNNGNIEETRRQLLDILHQWDLLDKGGSGHHHHHH

SEQ ID NO: 4345 - DNA, 639 bp, synthetic construct
  misc_feature 1..639: note = Variant of 3'O-kinase
  source 1..639: mol_type = other DNA
atggcggttaccattggtttaacaggagggatcgcagcgggcaaatcgactgtgagtgccatgatgcgtgaactgggtctgccggtcatcgatgctgacgaggcagcacgcgccgttatgaagccaggcgaagaagcgtatcgcgacattgtagctgcgttcggtccgggcattcttcgtgcggatggcgagatcgatcgccagaaactgggtgctatccgcttttcggacgaacaacaacgtaaggtgctgaattcgattgtaggtcctgcagtcctgaagaagatgctcgctgagaaagaagctcatatcaagtcaggcgccaagacggttgtgctggatatcccgctgctgttcgaatccggattgcaatcgtgggtcgacaaagttctcgtggtgtacgtcgatgatgatgttcagttacgccgccttatggcacgtaacgggtttactgaagaagaagctctgaagcgcattcgttcacagtggcccagtgcggagaaagttaaacgtgcagacgctgtcatcgacaataatggcaatattgaagaaacccgccgccagctgctggacctgttacaccagtgggatctgctggacaagggtggctccggccaccatcatcaccatcactaatga

SEQ ID NO: 4346 - protein, 211 aa, synthetic construct
  REGION 1..211: note = Variant of 3'O-kinase
MAVTIGLTGGIAAGKSTVSAMMRELGLPVIDADEAARAVMKPGEEAYRDIVAAFGPGILRADGEIDRQKLGAIRFSDEQQRKVLNSIVGPAVLKKMLAEKEAHIKSGAKTVVLDIPLLFESGLQSWVDKVLVVYVDDDVQLRRLMARNGFTEEEALKRIRSQWPSAEKVKRADAVIDNNGNIEETRRQLLDLLHQWDLLDKGGSGHHHHHH

SEQ ID NO: 4347 - DNA, 639 bp, synthetic construct
  misc_feature 1..639: note = Variant of 3'O-kinase
  source 1..639: mol_type = other DNA
atggcggttaccattggtttaacaggagggatcgcagcgggcaaatcgactgtgagtgccatgatgcgtgaactgggtctgccggtcatcgatgctgacgaggcagcacgcgccgttatgaagccaggcgaagaagcgtatcgcgacattgtagctgcgttcggtccgggcattcttcgtgcggatggcgagatcgatcgccagaaactgggtgctatccgcttttcggacgaacaacaacgtaaggtgctgaattcgattgtaggtcctgcagtcctgaagaagatgctcgctgagaaagaagctcatatcaagtcaggcgccaagacggttgtgctggatatcccgctgctgttcgaatccggattgcaatcgtgggtcgacaaagttctcgtggtgtacgtcgatgatgatgttcagttacgccgccttatggcacgtaacgggtttactgaagaagaagctctgaagcgcattcgttcacagtggcccagtgcggagaaagttaaacgtgcagacgctgtcatcgacaataatggcactattgaagaaacccgccgccagctgctggacattttacaccagtgggatctgctggacaagggtggctccggccaccatcatcaccatcactaatga

SEQ ID NO: 4348 - protein, 211 aa, synthetic construct
  REGION 1..211: note = Variant of 3'O-kinase
MAVTIGLTGGIAAGKSTVSAMMRELGLPVIDADEAARAVMKPGEEAYRDIVAAFGPGILRADGEIDRQKLGAIRFSDEQQRKVLNSIVGPAVLKKMLAEKEAHIKSGAKTVVLDIPLLFESGLQSWVDKVLVVYVDDDVQLRRLMARNGFTEEEALKRIRSQWPSAEKVKRADAVIDNNGTIEETRRQLLDILHQWDLLDKGGSGHHHHHH

SEQ ID NO: 4349 - DNA, 639 bp, synthetic construct
  misc_feature 1..639: note = Variant of 3'O-kinase
  source 1..639: mol_type = other DNA
atggcggttaccattggtttaacaggagggatcgcagcgggcaaatcgactgtgagtgccatgatgcgtgaactgggtctgccggtcatcgatgctgacgaggcagcacgcgccgttatgaagccaggcgaagaagcgtatcgcgacattgtagctgcgttcggtccgggcattcttcgtgcggatggcgagatcgatcgccagaaactgggtgctatccgcttttcggacgaacaacaacgtaaggtgctgaattcgattgtaggtcctgcagtcctgaagaagatgctcgctgagaaagaagctcatatcaagtcaggcgccaaggctgttgtgctggatatcccgctgctgttcgaatccggattgcaatcgtgggtcgacaaagttctcgtggtgtacgtcgatgatgatgttcagttacgccgccttatggcacgtaacgggtttactgaagaagaagctctgaagcgcattcgttcacagtggcccagtgcggagaaagttaaacgtgcagacgctgtcatcgacaataatggcaatattgaagaaacccgccgccagctgctggacattttacaccagtgggatctgctggacaagggtggctccggccaccatcatcaccatcactaatga

SEQ ID NO: 4350 - protein, 211 aa, synthetic construct
  REGION 1..211: note = Variant of 3'O-kinase
MAVTIGLTGGIAAGKSTVSAMMRELGLPVIDADEAARAVMKPGEEAYRDIVAAFGPGILRADGEIDRQKLGAIRFSDEQQRKVLNSIVGPAVLKKMLAEKEAHIKSGAKAVVLDIPLLFESGLQSWVDKVLVVYVDDDVQLRRLMARNGFTEEEALKRIRSQWPSAEKVKRADAVIDNNGNIEETRRQLLDILHQWDLLDKGGSGHHHHHH

SEQ ID NO: 4351 - DNA, 639 bp, synthetic construct
  misc_feature 1..639: note = Variant of 3'O-kinase
  source 1..639: mol_type = other DNA
atggcggttaccattggtttaacaggagggatcgcagcgggcaaatcgactgtgagtgccatgatgcgtgaactgggtctgccggtcatcgatgctgacgaggcagcacgcgccgttatgaagccaggcgaagaagcgtatcgcgacattgtagctgcgttcggtccgggcattcttcgtgcggatggcgagatcgatcgccagaaactgggtgctatccgcttttcggacgaacaacaacgtaaggtgctgaattcgattgtactgcctgcagtcctgaagaagatgctcgctgagaaagaagctcatatcaagtcaggcgccaagacggttgtgctggatatcccgctgctgttcgaatccggattgcaatcgtgggtcgacaaagttctcgtggtgtacgtcgatgatgatgttcagttacgccgccttatggcacgtaacgggtttactgaagaagaagctctgaagcgcattcgttcacagtggcccagtgcggagaaagttaaacgtgcagacgctgtcatcgacaataatggcaatattgaagaaacccgccgccagctgctggacattttacaccagtgggatctgctggacaagggtggctccggccaccatcatcaccatcactaatga

SEQ ID NO: 4352 - protein, 211 aa, synthetic construct
  REGION 1..211: note = Variant of 3'O-kinase
MAVTIGLTGGIAAGKSTVSAMMRELGLPVIDADEAARAVMKPGEEAYRDIVAAFGPGILRADGEIDRQKLGAIRFSDEQQRKVLNSIVLPAVLKKMLAEKEAHIKSGAKTVVLDIPLLFESGLQSWVDKVLVVYVDDDVQLRRLMARNGFTEEEALKRIRSQWPSAEKVKRADAVIDNNGNIEETRRQLLDILHQWDLLDKGGSGHHHHHH

SEQ ID NO: 4353 - DNA, 639 bp, synthetic construct
  misc_feature 1..639: note = Variant of 3'O-kinase
  source 1..639: mol_type = other DNA
atggcggttaccattggtttaacaggagggatcgcagcgggcaaatcgactgtgagtgccatgatgcgtgaactgggtctgccggtcatcgatgctgacgaggcagcacgcgccgttatgaagccaggcgaagaagcgtatcgcgacattgtagctgcgttcggtccgggcattcttcgtgcggatggcgagatcgatcgccagaaactgggtgctatccgcttttcggacgaacaacaacgtaaggtgctgaattcgattgtaggtcctgcagtcctgaagaagatgctcgctgagaaagaagctcatatcaagtcaggcgccaagacggttgtgctggatatcccgctgctgttcgaatccggattgcaatcgtgggtcgacaaagttctcgtggtgtacgtcgatgatgatgttcagttacgccgccttatggcacgtaacgggtttactgaagaagaagctctgaagcgcattgagtcacagtggcccagtgcggagaaagttaaacgtgcagacgctgtcatcgacaataatggcaatattgaagaaacccgccgccagctgctggacattttacaccagtgggatctgctggacaagggtggctccggccaccatcatcaccatcactaatga

SEQ ID NO: 4354 - protein, 211 aa, synthetic construct
  REGION 1..211: note = Variant of 3'O-kinase
MAVTIGLTGGIAAGKSTVSAMMRELGLPVIDADEAARAVMKPGEEAYRDIVAAFGPGILRADGEIDRQKLGAIRFSDEQQRKVLNSIVGPAVLKKMLAEKEAHIKSGAKTVVLDIPLLFESGLQSWVDKVLVVYVDDDVQLRRLMARNGFTEEEALKRIESQWPSAEKVKRADAVIDNNGNIEETRRQLLDILHQWDLLDKGGSGHHHHHH

SEQ ID NO: 4355 - DNA, 639 bp, synthetic construct
  misc_feature 1..639: note = Variant of 3'O-kinase
  source 1..639: mol_type = other DNA
atggcggttaccattggtttaacaggagggatcgcagcgggcaaatcgactgtgagtgccatgatgcgtgaactgggtctgccggtcatcgatgctgacgaggcagcacgcgccgttatggctccaggcgaagaagcgtatcgcgacattgtagctgcgttcggtccgggcattcttcgtgcggatggcgagatcgatcgccagaaactgggtgctatccgcttttcggacgaacaacaacgtaaggtgctgaattcgattgtaggtcctgcagtcctgaagaagatgctcgctgagaaagaagctcatatcaagtcaggcgccaagacggttgtgctggatatcccgctgctgttcgaatccggattgcaatcgtgggtcgacaaagttctcgtggtgtacgtcgatgatgatgttcagttacgccgccttatggcacgtaacgggtttactgaagaagaagctctgaagcgcattcgttcacagtggcccagtgcggagaaagttaaacgtgcagacgctgtcatcgacaataatggcaatattgaagaaacccgccgccagctgctggacattttacaccagtgggatctgctggacaagggtggctccggccaccatcatcaccatcactaatga

SEQ ID NO: 4356 - protein, 211 aa, synthetic construct
  REGION 1..211: note = Variant of 3'O-kinase
MAVTIGLTGGIAAGKSTVSAMMRELGLPVIDADEAARAVMAPGEEAYRDIVAAFGPGILRADGEIDRQKLGAIRFSDEQQRKVLNSIVGPAVLKKMLAEKEAHIKSGAKTVVLDIPLLFESGLQSWVDKVLVVYVDDDVQLRRLMARNGFTEEEALKRIRSQWPSAEKVKRADAVIDNNGNIEETRRQLLDILHQWDLLDKGGSGHHHHHH

SEQ ID NO: 4357 - DNA, 639 bp, synthetic construct
  misc_feature 1..639: note = Variant of 3'O-kinase
  source 1..639: mol_type = other DNA
atggcggttaccattggtttaacaggagggatcgcagcgggcaaatcgactgtgagtgccatgatgcgtgaactgggtctgccggtcatcgatgctgacgaggcagcacgcgccgttatgaagccaggcgaagaagcgtatcgcgacattgtagctgcgttcggtccgggcattcttcgtgcggatggcgagatcgatcgccagaaactggttgctatccgcttttcggacgaacaacaacgtaaggtgctgaattcgattgtaggtcctgcagtcctgaagaagatgctcgctgagaaagaagctcatatcaagtcaggcgccaagacggttgtgctggatatcccgctgctgttcgaatccggattgcaatcgtgggtcgacaaagttctcgtggtgtacgtcgatgatgatgttcagttacgccgccttatggcacgtaacgggtttactgaagaagaagctctgaagcgcattcgttcacagtggcccagtgcggagaaagttaaacgtgcagacgctgtcatcgacaataatggcaatattgaagaaacccgccgccagctgctggacattttacaccagtgggatctgctggacaagggtggctccggccaccatcatcaccatcactaatga

SEQ ID NO: 4358 - protein, 211 aa, synthetic construct
  REGION 1..211: note = Variant of 3'O-kinase
MAVTIGLTGGIAAGKSTVSAMMRELGLPVIDADEAARAVMKPGEEAYRDIVAAFGPGILRADGEIDRQKLVAIRFSDEQQRKVLNSIVGPAVLKKMLAEKEAHIKSGAKTVVLDIPLLFESGLQSWVDKVLVVYVDDDVQLRRLMARNGFTEEEALKRIRSQWPSAEKVKRADAVIDNNGNIEETRRQLLDILHQWDLLDKGGSGHHHHHH

SEQ ID NO: 4359 - DNA, 639 bp, synthetic construct
  misc_feature 1..639: note = Variant of 3'O-kinase
  source 1..639: mol_type = other DNA
atggcggttaccattggtttaacaggagggatcgcagcgggcaaatcgactgtgagtgccatgatgcgtgaactgggtctgccggtcatcgatgctgacgaggcagcacgcgccgttatgaagccaggcgaagaagcgtatcgcgacattgtagctgcgttcggtccgggcattcttcgtgcggatggcgagatcgatcgccagaaactgggtgctatccgcttttcggacgaacaacaacgtaaggtgctgaattcgattgtaggtcctgcagtcctgaagaagatgctcgctgagaaagaagctcatatcaagtcaggcgccaagacggttgtgctggatatcccgctgctgttcgaatccggattgcaatcgtgggtcgacaaagttctcgtggtgtacgtcgatgatgatgttcagttacgccgccttatggcacgtaacgggtttactgaagaagaagctctgaagcgcattaagtcacagtggcccagtgcggagaaagttaaacgtgcagacgctgtcatcgacaataatggcaatattgaagaaacccgccgccagctgctggacattttacaccagtgggatctgctggacaagggtggctccggccaccatcatcaccatcactaatga

SEQ ID NO: 4360 - protein, 211 aa, synthetic construct
  REGION 1..211: note = Variant of 3'O-kinase
MAVTIGLTGGIAAGKSTVSAMMRELGLPVIDADEAARAVMKPGEEAYRDIVAAFGPGILRADGEIDRQKLGAIRFSDEQQRKVLNSIVGPAVLKKMLAEKEAHIKSGAKTVVLDIPLLFESGLQSWVDKVLVVYVDDDVQLRRLMARNGFTEEEALKRIKSQWPSAEKVKRADAVIDNNGNIEETRRQLLDILHQWDLLDKGGSGHHHHHH

SEQ ID NO: 4361 - DNA, 639 bp, synthetic construct
  misc_feature 1..639: note = Variant of 3'O-kinase
  source 1..639: mol_type = other DNA
atggcggttaccattggtttaacaggagggatcgcagcgggcaaatcgactgtgagtgccatgatgcgtgaactgggtctgccggtcatcgatgctgacgaggcagcacgcgccgttatgaagccaggcgaagaagcgtatcgcgacattgtagctgcgttcggtccgggcattcttcgtgcggatggcgagatcgatcgccagaaactgggtgctatccgcttttcggacgaacaacaacgtaaggtgctgaattcgattgtaggtcctgcagtcctgaagaagatgctcgctgagaaagaagctcatatcaagtcaggcgccaagacggttgtgctggatatcccgctgctgttcgaatccggattgcaatcgtgggtcgacaaagttctcgtggtgtacgtcgatgatgatgttcagttacgccgccttatggcacgtaacgggtttactgaagaagaagctctgaagcgcattcgttcacaggtgcccagtgcggagaaagttaaacgtgcagacgctgtcatcgacaataatggcaatattgaagaaacccgccgccagctgctggacattttacaccagtgggatctgctggacaagggtggctccggccaccatcatcaccatcactaatga

SEQ ID NO: 4362 - protein, 211 aa, synthetic construct
  REGION 1..211: note = Variant of 3'O-kinase
MAVTIGLTGGIAAGKSTVSAMMRELGLPVIDADEAARAVMKPGEEAYRDIVAAFGPGILRADGEIDRQKLGAIRFSDEQQRKVLNSIVGPAVLKKMLAEKEAHIKSGAKTVVLDIPLLFESGLQSWVDKVLVVYVDDDVQLRRLMARNGFTEEEALKRIRSQVPSAEKVKRADAVIDNNGNIEETRRQLLDILHQWDLLDKGGSGHHHHHH

SEQ ID NO: 4363 - DNA, 639 bp, synthetic construct
  misc_feature 1..639: note = Variant of 3'O-kinase
  source 1..639: mol_type = other DNA
atggcggttaccattggtttaacaggagggatcgcagcgggcaaatcgactgtgagtgccatgatgcgtgaactgggtctgccggtcatcgatgctgacgaggcagcacgcgccgttatgaagccaggcgaagaagcgtatcgcgacattgtagctgcgttcggtccgggcattcttcgtgcggatggcgagatcgatcgccagaaactgggtgctatccgcttttcggacgaacaacaacgtaaggtgctgaattcgattgtaggtcctgcagtcctgaagaagatgctcgctgagaaagaagcttgtatcaagtcaggcgccaagacggttgtgctggatatcccgctgctgttcgaatccggattgcaatcgtgggtcgacaaagttctcgtggtgtacgtcgatgatgatgttcagttacgccgccttatggcacgtaacgggtttactgaagaagaagctctgaagcgcattcgttcacagtggcccagtgcggagaaagttaaacgtgcagacgctgtcatcgacaataatggcaatattgaagaaacccgccgccagctgctggacattttacaccagtgggatctgctggacaagggtggctccggccaccatcatcaccatcactaatga

SEQ ID NO: 4364 - protein, 211 aa, synthetic construct
  REGION 1..211: note = Variant of 3'O-kinase
MAVTIGLTGGIAAGKSTVSAMMRELGLPVIDADEAARAVMKPGEEAYRDIVAAFGPGILRADGEIDRQKLGAIRFSDEQQRKVLNSIVGPAVLKKMLAEKEACIKSGAKTVVLDIPLLFESGLQSWVDKVLVVYVDDDVQLRRLMARNGFTEEEALKRIRSQWPSAEKVKRADAVIDNNGNIEETRRQLLDILHQWDLLDKGGSGHHHHHH

SEQ ID NO: 4365 - DNA, 639 bp, synthetic construct
  misc_feature 1..639: note = Variant of 3'O-kinase
  source 1..639: mol_type = other DNA
atggcggttaccattggtttaacaggagggatcgcagcgggcaaatcgactgtgagtgccatgatgcgtgaactgggtctgccggtcatcgatgctgacgaggcagcacgcgccgttatgaagccaggcgaagaagcgtatcgcgacattgtagctgcgttcggtccgggcattcttcgtgcggatggcgagatcgatcgccagaaactgggtgctatccgcttttcggacgaacaacaacgtaaggtgctgaattcgattgtaggtcctgcagtcctgaagaagatgctcgctgagaaagaagctcatatcaagtcaggcgccaagacggttgtgctggatatcccgctgctgttcgaatccggattggcgtcgtgggtcgacaaagttctcgtggtgtacgtcgatgatgatgttcagttacgccgccttatggcacgtaacgggtttactgaagaagaagctctgaagcgcattcgttcacagtggcccagtgcggagaaagttaaacgtgcagacgctgtcatcgacaataatggcaatattgaagaaacccgccgccagctgctggacattttacaccagtgggatctgctggacaagggtggctccggccaccatcatcaccatcactaatga

SEQ ID NO: 4366 - protein, 211 aa, synthetic construct
  REGION 1..211: note = Variant of 3'O-kinase
MAVTIGLTGGIAAGKSTVSAMMRELGLPVIDADEAARAVMKPGEEAYRDIVAAFGPGILRADGEIDRQKLGAIRFSDEQQRKVLNSIVGPAVLKKMLAEKEAHIKSGAKTVVLDIPLLFESGLASWVDKVLVVYVDDDVQLRRLMARNGFTEEEALKRIRSQWPSAEKVKRADAVIDNNGNIEETRRQLLDILHQWDLLDKGGSGHHHHHH

SEQ ID NO: 4367 - DNA, 639 bp, synthetic construct
  misc_feature 1..639: note = Variant of 3'O-kinase
  source 1..639: mol_type = other DNA
atggcggttaccattggtttaacaggagggatcgcagcgggcaaatcgactgtgagttgtatgatgcgtgaactgggtctgccggtcatcgatgctgacgaggcagcacgcgccgttatgaagccaggcgaagaagcgtatcgcgacattgtagctgcgttcggtccgggcattcttcgtgcggatggcgagatcgatcgccagaaactgggtgctatccgcttttcggacgaacaacaacgtaaggtgctgaattcgattgtaggtcctgcagtcctgaagaagatgctcgctgagaaagaagctcatatcaagtcaggcgccaagacggttgtgctggatatcccgctgctgttcgaatccggattgcaatcgtgggtcgacaaagttctcgtggtgtacgtcgatgatgatgttcagttacgccgccttatggcacgtaacgggtttactgaagaagaagctctgaagcgcattcgttcacagtggcccagtgcggagaaagttaaacgtgcagacgctgtcatcgacaataatggcaatattgaagaaacccgccgccagctgctggacattttacaccagtgggatctgctggacaagggtggctccggccaccatcatcaccatcactaatga

SEQ ID NO: 4368 - protein, 211 aa, synthetic construct
  REGION 1..211: note = Variant of 3'O-kinase
MAVTIGLTGGIAAGKSTVSCMMRELGLPVIDADEAARAVMKPGEEAYRDIVAAFGPGILRADGEIDRQKLGAIRFSDEQQRKVLNSIVGPAVLKKMLAEKEAHIKSGAKTVVLDIPLLFESGLQSWVDKVLVVYVDDDVQLRRLMARNGFTEEEALKRIRSQWPSAEKVKRADAVIDNNGNIEETRRQLLDILHQWDLLDKGGSGHHHHHH

SEQ ID NO: 4369 - DNA, 639 bp, synthetic construct
  misc_feature 1..639: note = Variant of 3'O-kinase
  source 1..639: mol_type = other DNA
atggcggttaccattggtttaacaggagggatcgcagcgggcaaatcgactgtgagtgccatgatgcgtgaactgggtctgccggtcatcgatgctgacgaggcagcacgcgccgttatgaagccaggcgaagaagcgtatcgcgacattgtagctgcgttcggtccgggcattcttcgtgcggatggcgagatcgatcgccagaaactgggtgctatccgcttttcggacgaacaacaacgtaaggtgctgaattcgattgtaggtcctgcagtcctgaagtatatgctcgctgagaaagaagctcatatcaagtcaggcgccaagacggttgtgctggatatcccgctgctgttcgaatccggattgcaatcgtgggtcgacaaagttctcgtggtgtacgtcgatgatgatgttcagttacgccgccttatggcacgtaacgggtttactgaagaagaagctctgaagcgcattcgttcacagtggcccagtgcggagaaagttaaacgtgcagacgctgtcatcgacaataatggcaatattgaagaaacccgccgccagctgctggacattttacaccagtgggatctgctggacaagggtggctccggccaccatcatcaccatcactaatga

SEQ ID NO: 4370 - protein, 211 aa, synthetic construct
  REGION 1..211: note = Variant of 3'O-kinase
MAVTIGLTGGIAAGKSTVSAMMRELGLPVIDADEAARAVMKPGEEAYRDIVAAFGPGILRADGEIDRQKLGAIRFSDEQQRKVLNSIVGPAVLKYMLAEKEAHIKSGAKTVVLDIPLLFESGLQSWVDKVLVVYVDDDVQLRRLMARNGFTEEEALKRIRSQWPSAEKVKRADAVIDNNGNIEETRRQLLDILHQWDLLDKGGSGHHHHHH

SEQ ID NO: 4371 - DNA, 639 bp, synthetic construct
  misc_feature 1..639: note = Variant of 3'O-kinase
  source 1..639: mol_type = other DNA
atggcggttaccattggtttaacaggagggatcgcagcgggcaaatcgactgtgagtgccatgatgcgtgaactgggtctgccggtcatcgatgctgacgaggcagcacgcgccgttatgaagccaggcgaagaagcgtatcgcgacattgtagctgcgttcggtccgggcattcttcgtgcggatggcgagatcgatcgccagaaactgggtgctatccgcttttcggacgaacaacaacgtaaggtgctgaattcgattgtaggtcctgcagtcctgaagaagatgctcgctgagaaagaagctcatatcaagtcaggcgccaagacggttgtgctggatatcccgctgctgttcgaatccggattgcaatcgtgggtcgacaaacagctcgtggtgtacgtcgatgatgatgttcagttacgccgccttatggcacgtaacgggtttactgaagaagaagctctgaagcgcattcgttcacagtggcccagtgcggagaaagttaaacgtgcagacgctgtcatcgacaataatggcaatattgaagaaacccgccgccagctgctggacattttacaccagtgggatctgctggacaagggtggctccggccaccatcatcaccatcactaatga

SEQ ID NO: 4372 - protein, 211 aa, synthetic construct
  REGION 1..211: note = Variant of 3'O-kinase
MAVTIGLTGGIAAGKSTVSAMMRELGLPVIDADEAARAVMKPGEEAYRDIVAAFGPGILRADGEIDRQKLGAIRFSDEQQRKVLNSIVGPAVLKKMLAEKEAHIKSGAKTVVLDIPLLFESGLQSWVDKQLVVYVDDDVQLRRLMARNGFTEEEALKRIRSQWPSAEKVKRADAVIDNNGNIEETRRQLLDILHQWDLLDKGGSGHHHHHH

SEQ ID NO: 4373 - DNA, 639 bp, synthetic construct
  misc_feature 1..639: note = Variant of 3'O-kinase
  source 1..639: mol_type = other DNA
atggcggttaccattggtttaacaggagggatcgcagcgggcaaatcgactgtgagtgccatgatgcgtgaactgggtctgccggtcatcgatgctgacgaggcagcacgcgcctgtatgaagccaggcgaagaagcgtatcgcgacattgtagctgcgttcggtccgggcattcttcgtgcggatggcgagatcgatcgccagaaactgggtgctatccgcttttcggacgaacaacaacgtaaggtgctgaattcgattgtaggtcctgcagtcctgaagaagatgctcgctgagaaagaagctcatatcaagtcaggcgccaagacggttgtgctggatatcccgctgctgttcgaatccggattgcaatcgtgggtcgacaaagttctcgtggtgtacgtcgatgatgatgttcagttacgccgccttatggcacgtaacgggtttactgaagaagaagctctgaagcgcattcgttcacagtggcccagtgcggagaaagttaaacgtgcagacgctgtcatcgacaataatggcaatattgaagaaacccgccgccagctgctggacattttacaccagtgggatctgctggacaagggtggctccggccaccatcatcaccatcactaatga

SEQ ID NO: 4374 - protein, 211 aa, synthetic construct
  REGION 1..211: note = Variant of 3'O-kinase
MAVTIGLTGGIAAGKSTVSAMMRELGLPVIDADEAARACMKPGEEAYRDIVAAFGPGILRADGEIDRQKLGAIRFSDEQQRKVLNSIVGPAVLKKMLAEKEAHIKSGAKTVVLDIPLLFESGLQSWVDKVLVVYVDDDVQLRRLMARNGFTEEEALKRIRSQWPSAEKVKRADAVIDNNGNIEETRRQLLDILHQWDLLDKGGSGHHHHHH

SEQ ID NO: 4375 - DNA, 639 bp, synthetic construct
  misc_feature 1..639: note = Variant of 3'O-kinase
  source 1..639: mol_type = other DNA
atggcggttaccattggtttaacaggagggatcgcagcgggcaaatcgactgtgagtgccatgatgcgtgaactgggtctgccggtcatcgatgctgacgaggcagcacgcgccgttatgaagccaggcgaagaagcgtatcgcgacattgtagctgcgttcggtccgggcattcttcgtgcggatggcgagatcgatcgccagaaactgggtgctatccgcttttcggacgaacaacaacgtaaggtgctgaattcgattgtaggtcctgcagtcctgaagaagatgctcgctgagaaagaagctcatatcaagtcaggcgccaagacggttgtgctggatatcccgctgctgttcgaatccggattgcaatcgtgggtcgacaaagttctcgtggtgtacgtcgatgatgatgttcagttacgccgccttatggcacgtaacgggtttactgaagaagaagctctgaagcgcattcgttcacagtggcccagtgcggagaaagttaaacgtgcagacgcttggatcgacaataatggcaatattgaagaaacccgccgccagctgctggacattttacaccagtgggatctgctggacaagggtggctccggccaccatcatcaccatcactaatga

SEQ ID NO: 4376 - protein, 211 aa, synthetic construct
  REGION 1..211: note = Variant of 3'O-kinase
MAVTIGLTGGIAAGKSTVSAMMRELGLPVIDADEAARAVMKPGEEAYRDIVAAFGPGILRADGEIDRQKLGAIRFSDEQQRKVLNSIVGPAVLKKMLAEKEAHIKSGAKTVVLDIPLLFESGLQSWVDKVLVVYVDDDVQLRRLMARNGFTEEEALKRIRSQWPSAEKVKRADAWIDNNGNIEETRRQLLDILHQWDLLDKGGSGHHHHHH

SEQ ID NO: 4377 - DNA, 639 bp, synthetic construct
  misc_feature 1..639: note = Variant of 3'O-kinase
  source 1..639: mol_type = other DNA
atggcggttaccattggtttaacaggagggaaggcagcgggcaaatcgactgtgagtgccatgatgcgtgaactgggtctgccggtcatcgatgctgacgaggcagcacgcgccgttatgaagccaggcgaagaagcgtatcgcgacattgtagctgcgttcggtccgggcattcttcgtgcggatggcgagatcgatcgccagaaactgggtgctatccgcttttcggacgaacaacaacgtaaggtgctgaattcgattgtaggtcctgcagtcctgaagaagatgctcgctgagaaagaagctcatatcaagtcaggcgccaagacggttgtgctggatatcccgctgctgttcgaatccggattgcaatcgtgggtcgacaaagttctcgtggtgtacgtcgatgatgatgttcagttacgccgccttatggcacgtaacgggtttactgaagaagaagctctgaagcgcattcgttcacagtggcccagtgcggagaaagttaaacgtgcagacgctgtcatcgacaataatggcaatattgaagaaacccgccgccagctgctggacattttacaccagtgggatctgctggacaagggtggctccggccaccatcatcaccatcactaatga

SEQ ID NO: 4378 - protein, 211 aa, synthetic construct
  REGION 1..211: note = Variant of 3'O-kinase
MAVTIGLTGGKAAGKSTVSAMMRELGLPVIDADEAARAVMKPGEEAYRDIVAAFGPGILRADGEIDRQKLGAIRFSDEQQRKVLNSIVGPAVLKKMLAEKEAHIKSGAKTVVLDIPLLFESGLQSWVDKVLVVYVDDDVQLRRLMARNGFTEEEALKRIRSQWPSAEKVKRADAVIDNNGNIEETRRQLLDILHQWDLLDKGGSGHHHHHH

SEQ ID NO: 4379 - DNA, 639 bp, synthetic construct
  misc_feature 1..639: note = Variant of 3'O-kinase
  source 1..639: mol_type = other DNA
atggcggttaccattggtttaacaggagggatcgcagcgggcaaatcgactgtgagtgccatgatgcgtgaactgggtctgccggtcatcgatgctgacgaggcagcacgcgccgttatgaagccaggcgaagaagcgtatcgcgacattgtagctgcgttcggtccgggcattcttcgtgcggatggcgagatcgatcgccagaaactgggtgctatccgcttttcggacgaacaacaacgtaaggtgctgaattcgattgtaggtcctgcagtcctgaagaagatgctcgctgagaaagaagctcatatcaagtcaggcgccaagacggttgtgctggatatcccgctgctgttcgaatccggattgcaatcgtgggtcgacaaagttctcgtggtgtacgtcgatgatgatgttcagttacgccgccttatggcacgtaacgggtttactgaagaagaagctctgaagcgcattagttcacagtggcccagtgcggagaaagttaaacgtgcagacgctgtcatcgacaataatggcaatattgaagaaacccgccgccagctgctggacattttacaccagtgggatctgctggacaagggtggctccggccaccatcatcaccatcactaatga

SEQ ID NO: 4380 - protein, 211 aa, synthetic construct
  REGION 1..211: note = Variant of 3'O-kinase
MAVTIGLTGGIAAGKSTVSAMMRELGLPVIDADEAARAVMKPGEEAYRDIVAAFGPGILRADGEIDRQKLGAIRFSDEQQRKVLNSIVGPAVLKKMLAEKEAHIKSGAKTVVLDIPLLFESGLQSWVDKVLVVYVDDDVQLRRLMARNGFTEEEALKRISSQWPSAEKVKRADAVIDNNGNIEETRRQLLDILHQWDLLDKGGSGHHHHHH

SEQ ID NO: 4381 - DNA, 639 bp, synthetic construct
  misc_feature 1..639: note = Variant of 3'O-kinase
  source 1..639: mol_type = other DNA
atggcggttaccattggtttaacaggagggatcgcagcgggcaaatcgactgtgagtgccatgatgcgtgaactgggtctgccggtcatcgatgctgacgaggcagcacgcgccgttatgaagccaggcgaagaagcgtatcgcgacattgtagctgcgttcggtccgggcattcttcgtgcggatggcgagatcgatcgccagaaactgggtgctatccgcttttcggacgaacaacaacgtaaggtgctgaattcgattgtaggtcctgcagtcctgaagaagatgctcgctgagaaagaagctcatatcaagtcaggcgccaagacggttgtgctggatatcccgctgctgttcgaatccggattgcaatcgtgggtcgacaaagttctcgtggtgtacgtcgatgatgatgttcagttacgccgccttatgcatcgtaacgggtttactgaagaagaagctctgaagcgcattcgttcacagtggcccagtgcggagaaagttaaacgtgcagacgctgtcatcgacaataatggcaatattgaagaaacccgccgccagctgctggacattttacaccagtgggatctgctggacaagggtggctccggccaccatcatcaccatcactaatga

SEQ ID NO: 4382 - protein, 211 aa, synthetic construct
  REGION 1..211: note = Variant of 3'O-kinase
MAVTIGLTGGIAAGKSTVSAMMRELGLPVIDADEAARAVMKPGEEAYRDIVAAFGPGILRADGEIDRQKLGAIRFSDEQQRKVLNSIVGPAVLKKMLAEKEAHIKSGAKTVVLDIPLLFESGLQSWVDKVLVVYVDDDVQLRRLMHRNGFTEEEALKRIRSQWPSAEKVKRADAVIDNNGNIEETRRQLLDILHQWDLLDKGGSGHHHHHH

SEQ ID NO: 4383 - DNA, 639 bp, synthetic construct
  misc_feature 1..639: note = Variant of 3'O-kinase
  source 1..639: mol_type = other DNA
atggcggttaccattggtttaacaggagggatcgcagcgggcaaatcgactgtgagtgccatgatgcgtgaactgggtctgccggtcatcgatgctgacgaggcagcacgcgccgttatgaagccaggcgaagaagcgtatcgcgacattgtagctgcgttcggtccgggcattcttcgtgcggatggccgtatcgatcgccagaaactgggtgctatccgcttttcggacgaacaacaacgtaaggtgctgaattcgattgtaggtcctgcagtcctgaagaagatgctcgctgagaaagaagctcatatcaagtcaggcgccaagacggttgtgctggatatcccgctgctgttcgaatccggattgcaatcgtgggtcgacaaagttctcgtggtgtacgtcgatgatgatgttcagttacgccgccttatggcacgtaacgggtttactgaagaagaagctctgaagcgcattcgttcacagtggcccagtgcggagaaagttaaacgtgcagacgctgtcatcgacaataatggcaatattgaagaaacccgccgccagctgctggacattttacaccagtgggatctgctggacaagggtggctccggccaccatcatcaccatcactaatga

SEQ ID NO: 4384 - protein, 211 aa, synthetic construct
  REGION 1..211: note = Variant of 3'O-kinase
MAVTIGLTGGIAAGKSTVSAMMRELGLPVIDADEAARAVMKPGEEAYRDIVAAFGPGILRADGRIDRQKLGAIRFSDEQQRKVLNSIVGPAVLKKMLAEKEAHIKSGAKTVVLDIPLLFESGLQSWVDKVLVVYVDDDVQLRRLMARNGFTEEEALKRIRSQWPSAEKVKRADAVIDNNGNIEETRRQLLDILHQWDLLDKGGSGHHHHHH

SEQ ID NO: 4385 - DNA, 639 bp, synthetic construct
  misc_feature 1..639: note = Variant of 3'O-kinase
  source 1..639: mol_type = other DNA
atggcggttaccattggtttaacaggagggatcgcagcgggcaaatcgactgtgagtgccatgatgcgtgaactgggtctgccggtcatcgatgctgacgaggcagcacgcgccgttatgaagccaggcgaagaagcgtatcgcgacattgtagctgcgttcggtccgggcattcttcgtgcggatggcgagatcgatcgccagaaactgggtgctatccgcttttcggacgaacaacaacgtaaggtgctgaattcgattgtaggtcctgcagtcctgaagaagatgctcgctgagaaagaagctcatatcaagtcaggcgccaagacggttgtgctggatatcccgctgctgttcgaatccggattgcaatcgtgggtcgacaaagttctcgtggtgtactttgatgatgatgttcagttacgccgccttatggcacgtaacgggtttactgaagaagaagctctgaagcgcattcgttcacagtggcccagtgcggagaaagttaaacgtgcagacgctgtcatcgacaataatggcaatattgaagaaacccgccgccagctgctggacattttacaccagtgggatctgctggacaagggtggctccggccaccatcatcaccatcactaatga

SEQ ID NO: 4386 - protein, 211 aa, synthetic construct
  REGION 1..211: note = Variant of 3'O-kinase
MAVTIGLTGGIAAGKSTVSAMMRELGLPVIDADEAARAVMKPGEEAYRDIVAAFGPGILRADGEIDRQKLGAIRFSDEQQRKVLNSIVGPAVLKKMLAEKEAHIKSGAKTVVLDIPLLFESGLQSWVDKVLVVYFDDDVQLRRLMARNGFTEEEALKRIRSQWPSAEKVKRADAVIDNNGNIEETRRQLLDILHQWDLLDKGGSGHHHHHH

SEQ ID NO: 4387 - DNA, 639 bp, synthetic construct
  misc_feature 1..639: note = Variant of 3'O-kinase
  source 1..639: mol_type = other DNA
atggcggttaccattggtttaacaggagggatcgcagcgggcaaatcgactgtgagtgccatgatgcgtgaactgggtctgccggtcatcgatgctgacgaggcagcacgcgccgttatgaagccaggcgaagaagcgtatcgcgacattgtagctgcgttcggtccgggcattcttcgtgcggatggcgagatcgatcgccagaaactgggtgctatccgcttttcggacgaacaacaacgtaaggtgctgaattcgattgtaggtcctgcagtcctgaagcatatgctcgctgagaaagaagctcatatcaagtcaggcgccaagacggttgtgctggatatcccgctgctgttcgaatccggattgcaatcgtgggtcgacaaagttctcgtggtgtacgtcgatgatgatgttcagttacgccgccttatggcacgtaacgggtttactgaagaagaagctctgaagcgcattcgttcacagtggcccagtgcggagaaagttaaacgtgcagacgctgtcatcgacaataatggcaatattgaagaaacccgccgccagctgctggacattttacaccagtgggatctgctggacaagggtggctccggccaccatcatcaccatcactaatga

SEQ ID NO: 4388 - protein, 211 aa, synthetic construct
  REGION 1..211: note = Variant of 3'O-kinase
MAVTIGLTGGIAAGKSTVSAMMRELGLPVIDADEAARAVMKPGEEAYRDIVAAFGPGILRADGEIDRQKLGAIRFSDEQQRKVLNSIVGPAVLKHMLAEKEAHIKSGAKTVVLDIPLLFESGLQSWVDKVLVVYVDDDVQLRRLMARNGFTEEEALKRIRSQWPSAEKVKRADAVIDNNGNIEETRRQLLDILHQWDLLDKGGSGHHHHHH

SEQ ID NO: 4389 - DNA, 639 bp, synthetic construct
  misc_feature 1..639: note = Variant of 3'O-kinase
  source 1..639: mol_type = other DNA
atggcggttaccattggtttaacaggagggatcgcagcgggcaaatcgactgtgagtgccatgatgcgtgaactgggtctgccggtcatcgatgctgacgaggcagcacgcgccgttatgaagccaggcgaagaagcgtatcgcgacattgtagctgcgttcggtccgggcattcttcgtgcggatggcgttatcgatcgccagaaactgggtgctatccgcttttcggacgaacaacaacgtaaggtgctgaattcgattgtaggtcctgcagtcctgaagaagatgctcgctgagaaagaagctcatatcaagtcaggcgccaagacggttgtgctggatatcccgctgctgttcgaatccggattgcaatcgtgggtcgacaaagttctcgtggtgtacgtcgatgatgatgttcagttacgccgccttatggcacgtaacgggtttactgaagaagaagctctgaagcgcattcgttcacagtggcccagtgcggagaaagttaaacgtgcagacgctgtcatcgacaataatggcaatattgaagaaacccgccgccagctgctggacattttacaccagtgggatctgctggacaagggtggctccggccaccatcatcaccatcactaatga

SEQ ID NO: 4390 - protein, 211 aa, synthetic construct
  REGION 1..211: note = Variant of 3'O-kinase
MAVTIGLTGGIAAGKSTVSAMMRELGLPVIDADEAARAVMKPGEEAYRDIVAAFGPGILRADGVIDRQKLGAIRFSDEQQRKVLNSIVGPAVLKKMLAEKEAHIKSGAKTVVLDIPLLFESGLQSWVDKVLVVYVDDDVQLRRLMARNGFTEEEALKRIRSQWPSAEKVKRADAVIDNNGNIEETRRQLLDILHQWDLLDKGGSGHHHHHH

SEQ ID NO: 4391 - DNA, 639 bp, synthetic construct
  misc_feature 1..639: note = Variant of 3'O-kinase
  source 1..639: mol_type = other DNA
atggcggttaccattggtttaacaggagggatcgcagcgggcaaatcgactgtgagtgccatgatgcgtgaactgggtctgccggtcatcgatgctgacgaggcagcacgcgccgttatgaagccaggcgaagaagcgtatcgcgacattgtagctgcgttcggtccgggcattcttcgtgcggatggcgagatcgatcgccagaaactgggtcttatccgcttttcggacgaacaacaacgtaaggtgctgaattcgattgtaggtcctgcagtcctgaagaagatgctcgctgagaaagaagctcatatcaagtcaggcgccaagacggttgtgctggatatcccgctgctgttcgaatccggattgcaatcgtgggtcgacaaagttctcgtggtgtacgtcgatgatgatgttcagttacgccgccttatggcacgtaacgggtttactgaagaagaagctctgaagcgcattcgttcacagtggcccagtgcggagaaagttaaacgtgcagacgctgtcatcgacaataatggcaatattgaagaaacccgccgccagctgctggacattttacaccagtgggatctgctggacaagggtggctccggccaccatcatcaccatcactaatga

SEQ ID NO: 4392 - protein, 211 aa, synthetic construct
  REGION 1..211: note = Variant of 3'O-kinase
MAVTIGLTGGIAAGKSTVSAMMRELGLPVIDADEAARAVMKPGEEAYRDIVAAFGPGILRADGEIDRQKLGLIRFSDEQQRKVLNSIVGPAVLKKMLAEKEAHIKSGAKTVVLDIPLLFESGLQSWVDKVLVVYVDDDVQLRRLMARNGFTEEEALKRIRSQWPSAEKVKRADAVIDNNGNIEETRRQLLDILHQWDLLDKGGSGHHHHHH

SEQ ID NO: 4393 - DNA, 639 bp, synthetic construct
  misc_feature 1..639: note = Variant of 3'O-kinase
  source 1..639: mol_type = other DNA
atggcggttaccattggtttaacaggagggatcgcagcgggcaaatcgactgtgagtgccatgatgcgtgaactgggtctgccggtcatcgatgctgacgaggcagcacgcgccgttatgaagccaggcgaagaagcgtatcgcgacattgtagctgcgttcggtccgggcattcttcgtgcggatggcgagatcgatcgccagaaactgggtgctatccgcttttcggacgaacaacaacgtaaggtgctgaattcgattgtaggtcctgcagtcctgaagaagatgctcgctgagaaagaagctcatatcaagtcaggcgccaagacggttgtgctggatatcccgctgctgttcgaatccggattgcaatcgtgggtcgacaaagttctcgtggtgtacgtcgatgatgatgttcagttacgccgccttatggcacgtgtggggtttactgaagaagaagctctgaagcgcattcgttcacagtggcccagtgcggagaaagttaaacgtgcagacgctgtcatcgacaataatggcaatattgaagaaacccgccgccagctgctggacattttacaccagtgggatctgctggacaagggtggctccggccaccatcatcaccatcactaatga

SEQ ID NO: 4394 - protein, 211 aa, synthetic construct
  REGION 1..211: note = Variant of 3'O-kinase
MAVTIGLTGGIAAGKSTVSAMMRELGLPVIDADEAARAVMKPGEEAYRDIVAAFGPGILRADGEIDRQKLGAIRFSDEQQRKVLNSIVGPAVLKKMLAEKEAHIKSGAKTVVLDIPLLFESGLQSWVDKVLVVYVDDDVQLRRLMARVGFTEEEALKRIRSQWPSAEKVKRADAVIDNNGNIEETRRQLLDILHQWDLLDKGGSGHHHHHH

SEQ ID NO: 4395 - DNA, 639 bp, synthetic construct
  misc_feature 1..639: note = Variant of 3'O-kinase
  source 1..639: mol_type = other DNA
atggcggttaccattggtttaacaggagggatcgcagcgggcaaatcgactgtgagtgccatgatgcgtgaactgggtctgccggtcatcgatgctgacgaggcagcacgcgccgttatgaagccaggcgaagaagcgtatcgcgacattgtagctgcgttcggtccgggcattcttcgtgcggatggcgagatcgatcgccagaaactgggtgctatccgcttttcggacgaacaacaacgtaaggtgctgaattcgattgtaggtcctgcagtcctgaagaagatgctcgctgagaaagaagctcatatcaagtcaggcgccaagacggttgtgctggatatcccgctgctgttcgaatccggattgcaatcgtgggtcgacaaagttctcgtggtgtacgtcgatgatgatgttcagttacgccgccttatggcacgtaacgggtttactgaagaagaagctctgaagcgcattcgttcacagtggcccagtgcggagaaagttaaacgtgcagacgctgtcatcgacaataatggcaatccggaagaaacccgccgccagctgctggacattttacaccagtgggatctgctggacaagggtggctccggccaccatcatcaccatcactaatga

SEQ ID NO: 4396 - protein, 211 aa, synthetic construct
  REGION 1..211: note = Variant of 3'O-kinase
MAVTIGLTGGIAAGKSTVSAMMRELGLPVIDADEAARAVMKPGEEAYRDIVAAFGPGILRADGEIDRQKLGAIRFSDEQQRKVLNSIVGPAVLKKMLAEKEAHIKSGAKTVVLDIPLLFESGLQSWVDKVLVVYVDDDVQLRRLMARNGFTEEEALKRIRSQWPSAEKVKRADAVIDNNGNPEETRRQLLDILHQWDLLDKGGSGHHHHHH

SEQ ID NO: 4397 - DNA, 639 bp, synthetic construct
  misc_feature 1..639: note = Variant of 3'O-kinase
  source 1..639: mol_type = other DNA
atggcggttaccattggtttaacaggagggatcgcagcgggcaaatcgactgtgagtgccatgatgcgtgaactgggtctgccggtcatcgatgctgacgaggcagcacgcgccgttatgaagccaggcgaagaagcgtatcgcgacattgtagctgcgttcggtccgggcattcttcgtgcggatggcgagatcgatcgccagaaactgggtgctatccgcttttcggacgaacaacaacgtaaggtgctgaattcgattgtaggtcctgcagtcctgaagaagatgctcgctgagaaagaagctcatatcaagtcaggcgccaagacggttgtgctggatatcccgctgctgttcgaatccggattgcaatcgtgggtcgacaaagttctcgtggtgtacgtcgatgatgatgttcagttacgccgccttatggcacgtaacgggtttactgaagaagaagctctgaagcgcattcgttcacagtggcccagtgcggagaaagttaaacgtgcagacgctgtcatcgacaataatggcgttattgaagaaacccgccgccagctgctggacattttacaccagtgggatctgctggacaagggtggctccggccaccatcatcaccatcactaatga

SEQ ID NO: 4398 - protein, 211 aa, synthetic construct
  REGION 1..211: note = Variant of 3'O-kinase
MAVTIGLTGGIAAGKSTVSAMMRELGLPVIDADEAARAVMKPGEEAYRDIVAAFGPGILRADGEIDRQKLGAIRFSDEQQRKVLNSIVGPAVLKKMLAEKEAHIKSGAKTVVLDIPLLFESGLQSWVDKVLVVYVDDDVQLRRLMARNGFTEEEALKRIRSQWPSAEKVKRADAVIDNNGVIEETRRQLLDILHQWDLLDKGGSGHHHHHH

SEQ ID NO: 4399 - DNA, 639 bp, synthetic construct
  misc_feature 1..639: note = Variant of 3'O-kinase
  source 1..639: mol_type = other DNA
atggcggttaccattggtttaacaggatctatcgcagcgggcaaatcgactgtgagtgccatgatgcgtgaactgggtctgccggtcatcgatgctgacgaggcagcacgcgccgttatgaagccaggcgaagaagcgtatcgcgacattgtagctgcgttcggtccgggcattcttcgtgcggatggcgagatcgatcgccagaaactgggtgctatccgcttttcggacgaacaacaacgtaaggtgctgaattcgattgtaggtcctgcagtcctgaagaagatgctcgctgagaaagaagctcatatcaagtcaggcgccaagacggttgtgctggatatcccgctgctgttcgaatccggattgcaatcgtgggtcgacaaagttctcgtggtgtacgtcgatgatgatgttcagttacgccgccttatggcacgtaacgggtttactgaagaagaagctctgaagcgcattcgttcacagtggcccagtgcggagaaagttaaacgtgcagacgctgtcatcgacaataatggcaatattgaagaaacccgccgccagctgctggacattttacaccagtgggatctgctggacaagggtggctccggccaccatcatcaccatcactaatga

SEQ ID NO: 4400 - protein, 211 aa, synthetic construct
  REGION 1..211: note = Variant of 3'O-kinase
MAVTIGLTGSIAAGKSTVSAMMRELGLPVIDADEAARAVMKPGEEAYRDIVAAFGPGILRADGEIDRQKLGAIRFSDEQQRKVLNSIVGPAVLKKMLAEKEAHIKSGAKTVVLDIPLLFESGLQSWVDKVLVVYVDDDVQLRRLMARNGFTEEEALKRIRSQWPSAEKVKRADAVIDNNGNIEETRRQLLDILHQWDLLDKGGSGHHHHHH

SEQ ID NO: 4401 - DNA, 639 bp, synthetic construct
  misc_feature 1..639: note = Variant of 3'O-kinase
  source 1..639: mol_type = other DNA
atggcggttaccattggtttaacaggagggatcgcagcgggcaaatcgactgtgagtgccatgatgcgtgaactgggtctgccggtcatcgatgctgacgaggcagcacgcgccgttatgaagccaggcgaagaagcgtatcgcgacattgtagctgcgttcggtccgggcattcttcgtgcggatggcgagatcgatcgccagaaactgggtgctatccgcttttcggacgaacaacaacgtaaggtgctgaattcgattgtaggtcctgcagtcctgaagaagacgctcgctgagaaagaagctcatatcaagtcaggcgccaagacggttgtgctggatatcccgctgctgttcgaatccggattgcaatcgtgggtcgacaaagttctcgtggtgtacgtcgatgatgatgttcagttacgccgccttatggcacgtaacgggtttactgaagaagaagctctgaagcgcattcgttcacagtggcccagtgcggagaaagttaaacgtgcagacgctgtcatcgacaataatggcaatattgaagaaacccgccgccagctgctggacattttacaccagtgggatctgctggacaagggtggctccggccaccatcatcaccatcactaatga

SEQ ID NO: 4402 - protein, 211 aa, synthetic construct
  REGION 1..211: note = Variant of 3'O-kinase
MAVTIGLTGGIAAGKSTVSAMMRELGLPVIDADEAARAVMKPGEEAYRDIVAAFGPGILRADGEIDRQKLGAIRFSDEQQRKVLNSIVGPAVLKKTLAEKEAHIKSGAKTVVLDIPLLFESGLQSWVDKVLVVYVDDDVQLRRLMARNGFTEEEALKRIRSQWPSAEKVKRADAVIDNNGNIEETRRQLLDILHQWDLLDKGGSGHHHHHH

SEQ ID NO: 4403 - DNA, 639 bp, synthetic construct
  misc_feature 1..639: note = Variant of 3'O-kinase
  source 1..639: mol_type = other DNA
atggcggttaccattggtttaacaggagggatcgcagcgggcaaatcgactgtgagtgccatgatgcgtgaactgggtctgccggtcatcgatgctgacgaggcagcacgcgccgttatgaagccaggcgaagaagcgtatcgcgacattgtagctgcgttcggtccgggcattcttcgtgcggatggcgagatcgatcgccagaaactgggtgctatccgcttttcggacgaacaacaacgtaaggtgctgaattcgattgtaggtcctgcagtcctgaagaagatgctcgctgagaaagaagctcatatcaagtcaggcgccaagacggttgtgctggatatcccgctgctgttcgaatccggattgcaatcgtgggtcgacaaagttctcgtggtgtacgtcgatgatgatgttcagttacgccgccttatggcacgtaacgggtttactgaagaagaagctctgaagcgcattcgttcacagtggcccagtgcggagaaagttaaacgtgcagacgctgtcatcgacatgaatggcaatattgaagaaacccgccgccagctgctggacattttacaccagtgggatctgctggacaagggtggctccggccaccatcatcaccatcactaatga

SEQ ID NO: 4404 - protein, 211 aa, synthetic construct
  REGION 1..211: note = Variant of 3'O-kinase
MAVTIGLTGGIAAGKSTVSAMMRELGLPVIDADEAARAVMKPGEEAYRDIVAAFGPGILRADGEIDRQKLGAIRFSDEQQRKVLNSIVGPAVLKKMLAEKEAHIKSGAKTVVLDIPLLFESGLQSWVDKVLVVYVDDDVQLRRLMARNGFTEEEALKRIRSQWPSAEKVKRADAVIDMNGNIEETRRQLLDILHQWDLLDKGGSGHHHHHH

SEQ ID NO: 4405 - DNA, 639 bp, synthetic construct
  misc_feature 1..639: note = Variant of 3'O-kinase
  source 1..639: mol_type = other DNA
atggcggttaccattggtttaacaggagggatcgcagcgggcaaatcgactgtgagtgccatgatgcgtgaactgggtctgccggtcatcgatgctgacgaggcagcacgctctgttatgaagccaggcgaagaagcgtatcgcgacattgtagctgcgttcggtccgggcattcttcgtgcggatggcgagatcgatcgccagaaactgggtgctatccgcttttcggacgaacaacaacgtaaggtgctgaattcgattgtaggtcctgcagtcctgaagaagatgctcgctgagaaagaagctcatatcaagtcaggcgccaagacggttgtgctggatatcccgctgctgttcgaatccggattgcaatcgtgggtcgacaaagttctcgtggtgtacgtcgatgatgatgttcagttacgccgccttatggcacgtaacgggtttactgaagaagaagctctgaagcgcattcgttcacagtggcccagtgcggagaaagttaaacgtgcagacgctgtcatcgacaataatggcaatattgaagaaacccgccgccagctgctggacattttacaccagtgggatctgctggacaagggtggctccggccaccatcatcaccatcactaatga

SEQ ID NO: 4406 - protein, 211 aa, synthetic construct
  REGION 1..211: note = Variant of 3'O-kinase
MAVTIGLTGGIAAGKSTVSAMMRELGLPVIDADEAARSVMKPGEEAYRDIVAAFGPGILRADGEIDRQKLGAIRFSDEQQRKVLNSIVGPAVLKKMLAEKEAHIKSGAKTVVLDIPLLFESGLQSWVDKVLVVYVDDDVQLRRLMARNGFTEEEALKRIRSQWPSAEKVKRADAVIDNNGNIEETRRQLLDILHQWDLLDKGGSGHHHHHH

SEQ ID NO: 4407 - DNA, 639 bp, synthetic construct
  misc_feature 1..639: note = Variant of 3'O-kinase
  source 1..639: mol_type = other DNA
atggcggtcaccattggtttaacaggagggatcgcagcgggcaaatcgactgtgagtgccatgatgcgtgaactgggtctgccggtcatcgatgctgacgaggcagctcgcgccgttatgaagccaggcgaagaagcgtatcgcgacattgtagctgaattcggtccgggcctgcttcgtgaagatggcgagatcgatcgccagaaactgggtgctatccgcttttcggacgaacaacaacgtaaggtgctgaattcgattgtaggtcctgcagtcctgaagaagatgctcgctgagtgggaagctcatatcgggtcaggcgccaagacggttgtgctggatatcccgctgctgttcgaatccggattgcaatcgatggtcgacaaagttctcgtggtgtacgtcgatgatgatgttcagttacgccgccttatggcacgtaacgggtttactgaagaagaagctctgaagcgcattcgttcacagtggcccagtgcggagaaagttaaacgtgcagacgctgtcatcgacaataatggcaatattgaagaaacccgccgccagctgctggacattttacaccagtgggatctgctggacaagggtggctccggccaccatcatcaccatcactaatga

SEQ ID NO: 4408 - protein, 211 aa, synthetic construct
  REGION 1..211: note = Variant of 3'O-kinase
MAVTIGLTGGIAAGKSTVSAMMRELGLPVIDADEAARAVMKPGEEAYRDIVAEFGPGLLREDGEIDRQKLGAIRFSDEQQRKVLNSIVGPAVLKKMLAEWEAHIGSGAKTVVLDIPLLFESGLQSMVDKVLVVYVDDDVQLRRLMARNGFTEEEALKRIRSQWPSAEKVKRADAVIDNNGNIEETRRQLLDILHQWDLLDKGGSGHHHHHH

SEQ ID NO: 4409 - DNA, 639 bp, synthetic construct
  misc_feature 1..639: note = Variant of 3'O-kinase
  source 1..639: mol_type = other DNA
atggcggacaccattggtttaacaggagggatcgcagcgggcaaatcgactgtgagtgccatgatgcgtgaagcgggtctgccggtgatcgatgctgacgaggcagctcgcgccgttatgaagccaggcgaagaagcgtatcgcgacattgtagctgaattcggtccgggcattcttcgtgcagatggcgagatcgatcgccagaaactgggtgctatccgcttttcggacgaacaacaacgtaaggtgctgaattcgattgtaggtcctgcagtcctgaagaagatgctcgctgagtgggaagctcatatcgggtcaggcgccaagacggttgtgctggatatcccgctgctgttcgaatccggattgcaatcgatggtcgacaaagttctcgtggtgtacgtcgatgatgatgttcagttacgccgccttatggcacgtaacgggtttactgaagaagaagctctgaagcgcattcgttcacagtggcccagtgcggagaaagttaaacgtgcagacgctgtcatcgacaataatggcaatattgaagaaacccgccgccagctgctggacattttacaccagtgggatctgctggacaagggtggctccggccaccatcatcaccatcactaatga

SEQ ID NO: 4410 - protein, 211 aa, synthetic construct
  REGION 1..211: note = Variant of 3'O-kinase
MADTIGLTGGIAAGKSTVSAMMREAGLPVIDADEAARAVMKPGEEAYRDIVAEFGPGILRADGEIDRQKLGAIRFSDEQQRKVLNSIVGPAVLKKMLAEWEAHIGSGAKTVVLDIPLLFESGLQSMVDKVLVVYVDDDVQLRRLMARNGFTEEEALKRIRSQWPSAEKVKRADAVIDNNGNIEETRRQLLDILHQWDLLDKGGSGHHHHHH

SEQ ID NO: 4411 - DNA, 639 bp, synthetic construct
  misc_feature 1..639: note = Variant of 3'O-kinase
  source 1..639: mol_type = other DNA
atggcggttaccattggtttaacaggagggatcgcagcgggcaaatcgactgtgagtgccatgatgcgtgaactgggtctgccggtcatcgatgctgacgaggcagcacgcgccgttatgaagccaggcgaagaagcgtatcgcgacattgtagctgaattcggtccgggcatccttcgtgcggatggcgagatcgatcgccagaaactgggtgctatccgcttttcggacgaacaacaacgtaaggtgctgaattcgattgtaggtcctgcagtcctgaagaagatgctcgctgagtgggaagctcatatcgggtcaggcgccaagacggttgtgctggatatcccgctgctgttcgaatccggattgcaatcgtgggtggacaaagttctcgtggtgtacgtcgatgatgatgttcagttacgccgccttatggcacgtaacgggtttactgaagaagaagctctgaagcgcattcgttcacagtggcccagtgcggataaagttaaactggcagccgctgtcatcgacaataatggcaatattgaagaaacccgccgccagctgctggacattttacaccagtgggatctgctggacaagggtggctccggccaccatcatcaccatcactaatga

SEQ ID NO: 4412 - protein, 211 aa, synthetic construct
  REGION 1..211: note = Variant of 3'O-kinase
MAVTIGLTGGIAAGKSTVSAMMRELGLPVIDADEAARAVMKPGEEAYRDIVAEFGPGILRADGEIDRQKLGAIRFSDEQQRKVLNSIVGPAVLKKMLAEWEAHIGSGAKTVVLDIPLLFESGLQSWVDKVLVVYVDDDVQLRRLMARNGFTEEEALKRIRSQWPSADKVKLAAAVIDNNGNIEETRRQLLDILHQWDLLDKGGSGHHHHHH

SEQ ID NO: 4413 - DNA, 639 bp, synthetic construct
  misc_feature 1..639: note = Variant of 3'O-kinase
  source 1..639: mol_type = other DNA
atggcggtcaccattggtttaacaggagggatcgcagcgggcaaatcgactgtgagtgccatgatgcgtgaagcgggtctgccggtgatcgatgctgacgaggcagctcgcgccgttatgaagccaggcgaagaagcgtatcgcgacattgtagctgaattcggtccgggcctgcttctggcagatggcgagatcgatcgccagaaactgggtgctatccgcttttcggacgaacaacaacgtaaggtgctgaattcgattgtaggtcctgcagtcctgaagaagatgctcgctgagtgggaagctcatatcgggtcaggcgccaagacggttgtgctggatatcccgctgctgttcgaatccggattgcaatcgtgggtcgacaaagttctcgtggtgtacgtcgatgatgatgttcagttacgccgccttatggcacgtaacgggtttactgaagaagaagctctgaagcgcattcgttcacagtggcccagtgcggagaaagttaaacgtgcagacgctgtcatcgacaataatggcaatattgaagaaacccgccgccagctgctggacattttacaccagtgggatctgctggacaagggtggctccggccaccatcatcaccatcactaatga

SEQ ID NO: 4414 - protein, 211 aa, synthetic construct
  REGION 1..211: note = Variant of 3'O-kinase
MAVTIGLTGGIAAGKSTVSAMMREAGLPVIDADEAARAVMKPGEEAYRDIVAEFGPGLLLADGEIDRQKLGAIRFSDEQQRKVLNSIVGPAVLKKMLAEWEAHIGSGAKTVVLDIPLLFESGLQSWVDKVLVVYVDDDVQLRRLMARNGFTEEEALKRIRSQWPSAEKVKRADAVIDNNGNIEETRRQLLDILHQWDLLDKGGSGHHHHHH

SEQ ID NO: 4415 - DNA, 639 bp, synthetic construct
  misc_feature 1..639: note = Variant of 3'O-kinase
  source 1..639: mol_type = other DNA
atggcggttaccattggtttaacaggagggatcgcagcgggcaaatcgactgtgagtgccatgatgcgtgaactgggtctgccggtcatcgatgctgacgaggcagcacgcgccgttatgaagccaggcgaagaagcgtatcgcgacattgtagctgaattcgggccgggcatccttcgtgcggatggcgagatcgatcgccagaaactgggtgctatccgcttttcggacgaacaacaacgtaaggtgctgaattcgattgtaggtcctgcagtcctgaagaagatgctcgcggagtgggaagctcatatcgggtcaggcgccaagacggttgtgctggatatcccgctgctgttcgaatccggattgcaatcgtggatggacaaagttctcgtggtgtacgtcgatgatgatgttcagttacgccgccttatggcacgtaacgggtttactgaagaagaagctctgaagcgcattcgttcacagtggcccagtgcggagaaagttaaacgtgcagacgctgtcatcgacaataatggcaatattgaagaaacccgccgccagctgctggacattttacaccagtgggatctgctggacaaaggtggctccggccaccatcatcaccatcactaatga

SEQ ID NO: 4416 - protein, 211 aa, synthetic construct
  REGION 1..211: note = Variant of 3'O-kinase
MAVTIGLTGGIAAGKSTVSAMMRELGLPVIDADEAARAVMKPGEEAYRDIVAEFGPGILRADGEIDRQKLGAIRFSDEQQRKVLNSIVGPAVLKKMLAEWEAHIGSGAKTVVLDIPLLFESGLQSWMDKVLVVYVDDDVQLRRLMARNGFTEEEALKRIRSQWPSAEKVKRADAVIDNNGNIEETRRQLLDILHQWDLLDKGGSGHHHHHH

SEQ ID NO: 4417 - DNA, 639 bp, synthetic construct
  misc_feature 1..639: note = Variant of 3'O-kinase
  source 1..639: mol_type = other DNA
atggcggtcaccattggtttaacaggagggatcgcagcgggcaaatcgactgtgagtgccatgatgcgtgaaatgggtctgccggtgatcgatgctgacgaggcagctcgcgccgttatgaagccaggctgtgaagcgtatcgcgacattgtagctgaattcggtccgggctgccttcgtgcagatggcgagatcgatcgccagaaactgggtgctatccgcttttcggacgaacaacaacgtaaggtgctgaattcgattgtaggtcctgcagtcctgaagaagatgctcgctgagtgggaagctcatatcgggtcaggcgccaagacggttgtgctggatatcccgctgctgttcgaatccggattgcaatcgtgggtcgacaaagttctcgtggtgtacgtcgatgatgatgttcagttacgccgccttatggcacgtaacgggtttactgaagaagaagctctgaagcgcattcgttcacagtggcccagtgcggagaaagttaaacgtgcagacgctgtcatcgacaataatggcaatattgaagaaacccgccgccagctgctggacattttacaccagtgggatctgctggacaagggtggctccggccaccatcatcaccatcactaatga

SEQ ID NO: 4418 - protein, 211 aa, synthetic construct
  REGION 1..211: note = Variant of 3'O-kinase
MAVTIGLTGGIAAGKSTVSAMMREMGLPVIDADEAARAVMKPGCEAYRDIVAEFGPGCLRADGEIDRQKLGAIRFSDEQQRKVLNSIVGPAVLKKMLAEWEAHIGSGAKTVVLDIPLLFESGLQSWVDKVLVVYVDDDVQLRRLMARNGFTEEEALKRIRSQWPSAEKVKRADAVIDNNGNIEETRRQLLDILHQWDLLDKGGSGHHHHHH

SEQ ID NO: 4419 - DNA, 639 bp, synthetic construct
  misc_feature 1..639: note = Variant of 3'O-kinase
  source 1..639: mol_type = other DNA
atggcggacaccattggtttaacaggagggatcgcagcgggcaaatcgactgtgagtgccatgatgcgtgaagcgggtctgccggcgatcgatgctgacgaggcagctcgcgccgttatgaagccaggcgaagaagcgtatcgcgacattgtagctgaattcggtccgggcattctttgtgcagatggcgagatcgatcgccagaaactgggtgctatccgcttttcggacgaacaacaacgtaaggtgctgaattcgattgtaggtcctgcagtcctgaagaagatgctcgctgagtgggaagctcatatcgggtcaggcgccaagacggttgtgctggatatcccgctgctgttcgaatccggattgcaatcgtgggtcgacaaagttctcgtggtgtacgtcgatgatgatgttcagttacgccgccttatggcacgtaacgggtttactgaagaagaagctctgaagcgcattcgttcacagtggcccagtgcggagaaagttgctcgtgcagacgctgtcatcgacaataatggcaatattgaagaaacccgccgccagctgctggacattttacaccagtgggatctgctggacaagggtggctccggccaccatcatcaccatcactaatga

SEQ ID NO: 4420 - protein, 211 aa, synthetic construct
  REGION 1..211: note = Variant of 3'O-kinase
MADTIGLTGGIAAGKSTVSAMMREAGLPAIDADEAARAVMKPGEEAYRDIVAEFGPGILCADGEIDRQKLGAIRFSDEQQRKVLNSIVGPAVLKKMLAEWEAHIGSGAKTVVLDIPLLFESGLQSWVDKVLVVYVDDDVQLRRLMARNGFTEEEALKRIRSQWPSAEKVARADAVIDNNGNIEETRRQLLDILHQWDLLDKGGSGHHHHHH

SEQ ID NO: 4421 - DNA, 639 bp, synthetic construct
  misc_feature 1..639: note = Variant of 3'O-kinase
  source 1..639: mol_type = other DNA
atggcggacaccattggtttaacaggagggatcgcagcgggcaaatcgactgtgagtgccatgatgcgtgaagcgggtctgccggcgatcgatgctgacgaggcagcacgcgccgttatgaagccaggcgaagaagcgtatcgcgacattgtagctgaattcggtccgggcatccttcgtgcggatggcgagatcgatcgccagaaactgggtgctatccgcttttcggacgaacaacaacgtaaggtgctgaattcgattgtaggtcctgcagtcctgaagaagatgctcgctgagtgggaagctcatatcgggtcaggcgccaagacggttgtgctggatatcccgctgctgttcgaatccggattgcaatcggtggtcgacaaagttctcgtggtgtacgtcgatgatgatgttcagttacgccgccttatggcacgtaacgggtttactgaagaagaagctctgaagcgcattcgttcacagtggcccagtgcggagaaagttaaacgtgcagacgctgtcatcgacaataatggcaatattgaagaaacccgccgccagctgctggacattttacaccagtgggatctgctggacaagggtggctccggccaccatcatcaccatcactaatga

SEQ ID NO: 4422 - protein, 211 aa, synthetic construct
  REGION 1..211: note = Variant of 3'O-kinase
MADTIGLTGGIAAGKSTVSAMMREAGLPAIDADEAARAVMKPGEEAYRDIVAEFGPGILRADGEIDRQKLGAIRFSDEQQRKVLNSIVGPAVLKKMLAEWEAHIGSGAKTVVLDIPLLFESGLQSVVDKVLVVYVDDDVQLRRLMARNGFTEEEALKRIRSQWPSAEKVKRADAVIDNNGNIEETRRQLLDILHQWDLLDKGGSGHHHHHH

SEQ ID NO: 4423 - DNA, 639 bp, synthetic construct
  misc_feature 1..639: note = Variant of 3'O-kinase
  source 1..639: mol_type = other DNA
atggcggacaccattggtttaacaggagggatcgcagcgggcaaatcgactgtgagtgccatgatgcgtgaactgggtctgccggtgatcgatgctgacgaggcagcacgcgccgttatgaagccaggctgtgaagcgtatcgcgacattgtagctgaattcggtccgggcatccttcgtgcggatggcgagatcgatcgccagaaactgggtgctatccgcttttcggacgaacaacaacgtaaggtgctgaattcgattgtaggtcctgcagtcctgaagaagatgctcgctgagtgggaagctcatatcgggtcaggcgccaagacggttgtgctggatatcccgctgctgttcgaatccggattgcaatcgatggtcgacaaagttctcgtggtgtacgtcgatgatgatgttcagttacgccgccttatggcacgtaacgggtttactgaagaagaagctctgaagcgcattcgttcacagtggcccagtgcggagaaagttgctcgtgcagacgctgtcatcgacaataatggcaatattgaagaaacccgccgccagctgctggacattttacaccagtgggatctgctggacaagggtggctccggccaccatcatcaccatcactaatga

SEQ ID NO: 4424 - protein, 211 aa, synthetic construct
  REGION 1..211: note = Variant of 3'O-kinase
MADTIGLTGGIAAGKSTVSAMMRELGLPVIDADEAARAVMKPGCEAYRDIVAEFGPGILRADGEIDRQKLGAIRFSDEQQRKVLNSIVGPAVLKKMLAEWEAHIGSGAKTVVLDIPLLFESGLQSMVDKVLVVYVDDDVQLRRLMARNGFTEEEALKRIRSQWPSAEKVARADAVIDNNGNIEETRRQLLDILHQWDLLDKGGSGHHHHHH

SEQ ID NO: 4425 - DNA, 639 bp, synthetic construct
  misc_feature 1..639: note = Variant of 3'O-kinase
  source 1..639: mol_type = other DNA
atggcggtcaccattggtttaacaggagggatcgcagcgggcaaatcgactgtgagtgccatgatgcgtgaactgggtctgccggtcatcgatgctgacgaggcagcacgcgccgttatgaagccaggcgaagaagcgtatcgcgacattgtagctgaattcggtccgggcattcttcgtgcggatggcgagatcgatcgccagaaactgggtgctatccgcttttcggacgaacaacaacgtaaggtgctgaattcgattgtaggtcctgcagtcctgaagaagatgctcgctgagtgggaagctcatatcgggtcaggcgccaagacggttgtgctggatatcccgctgctgttcgaatccggattgcaatcgtgggtcgacaaagttctcgtggtgtacgtcgatgatgatgttcagttacgccgccttatggcacgtaacgggtttactgaagaagaagctctgaagcgcattcgttcacagtggcccagtgcggagaaagttgctcgtgcagacgctgtcatcgacaataatggcaatattgaagaaacccgccgccagctgctggacattttacaccagtgggatctgctggacaagggtggctccggccaccatcatcaccatcactaatga

SEQ ID NO: 4426 - protein, 211 aa, synthetic construct
  REGION 1..211: note = Variant of 3'O-kinase
MAVTIGLTGGIAAGKSTVSAMMRELGLPVIDADEAARAVMKPGEEAYRDIVAEFGPGILRADGEIDRQKLGAIRFSDEQQRKVLNSIVGPAVLKKMLAEWEAHIGSGAKTVVLDIPLLFESGLQSWVDKVLVVYVDDDVQLRRLMARNGFTEEEALKRIRSQWPSAEKVARADAVIDNNGNIEETRRQLLDILHQWDLLDKGGSGHHHHHH

SEQ ID NO: 4427 - DNA, 639 bp, synthetic construct
  misc_feature 1..639: note = Variant of 3'O-kinase
  source 1..639: mol_type = other DNA
atggcggtcaccattggtttaacaggagggatcgcagcgggcaaatcgactgtgagtgccatgatgcgtgaactgggtctgccggtgatcgatgctgacgaggcagcacgcgccgttatgaagccaggcgacgaagcgtatcgcgacattgtagctgaattcggtccgggcctgcttctggaagatggcgagatcgatcgccagaaactgggtgctatccgcttttcggacgaacaacaacgtaaggtgctgaattcgattgtaggtcctgcagtcctgaagaagatgctcgctgagtgggaagctcatatcgggtcaggcgccaagacggttgtgctggatatcccgctgctgttcgaatccggattgcaatcgtgcgtcgacaaagttctcgtggtgtacgtcgatgatgatgttcagttacgccgccttatggcacgtaacgggtttactgaagaagaagctctgaagcgcattcgttcacagtggcccagtgcggagaaagttgctcgtgcagacgctgtcatcgacaataatggcaatattgaagaaacccgccgccagctgctggacattttacaccagtgggatctgctggacaagggtggctccggccaccatcatcaccatcactaatga

SEQ ID NO: 4428 - protein, 211 aa, synthetic construct
  REGION 1..211: note = Variant of 3'O-kinase
MAVTIGLTGGIAAGKSTVSAMMRELGLPVIDADEAARAVMKPGDEAYRDIVAEFGPGLLLEDGEIDRQKLGAIRFSDEQQRKVLNSIVGPAVLKKMLAEWEAHIGSGAKTVVLDIPLLFESGLQSCVDKVLVVYVDDDVQLRRLMARNGFTEEEALKRIRSQWPSAEKVARADAVIDNNGNIEETRRQLLDILHQWDLLDKGGSGHHHHHH

SEQ ID NO: 4429 - DNA, 639 bp, synthetic construct
  misc_feature 1..639: note = Variant of 3'O-kinase
  source 1..639: mol_type = other DNA
atggcggttaccattggtttaacaggagggatcgcagcgggcaaatcgagtgtgagtgccatgatgcgtgaactgggtctgccggtcatcgatgctgacgaggcagcacgcgccgttatgaagccaggcgaagaagcgtatcgcgacattgtagctgaattcggtccgggcatcctgcgtgcggatagtgagatcgatcgccagaaactgggtgctatccgcttttcggacgaacaacaacgtaaggtgctgaattcgattgtaggtcctgcagtcctgaagaagatgctcgctgagtgggaagctcattttgggtcaggcgccaagacggttgtgctggatatcccgctgctgttcgaatccggattgcaacgttgggtcgacaaagttctcgtggtgtacgtcgatgatgatgttcagttacgccgccttatggcacgtaacgggtttactgaagaagaagctctgaagcgcattcgttcacagtggcccagtgcggagaaagttaaacgtgcagacgctgtcatcgacaataatggcaatattgaagaaacccgccgccagctgctggacattttacaccagtgggatctgctggacaagggtggctccggccaccatcatcaccatcactaatga

SEQ ID NO: 4430 - protein, 211 aa, synthetic construct
  REGION 1..211: note = Variant of 3'O-kinase
MAVTIGLTGGIAAGKSSVSAMMRELGLPVIDADEAARAVMKPGEEAYRDIVAEFGPGILRADSEIDRQKLGAIRFSDEQQRKVLNSIVGPAVLKKMLAEWEAHFGSGAKTVVLDIPLLFESGLQRWVDKVLVVYVDDDVQLRRLMARNGFTEEEALKRIRSQWPSAEKVKRADAVIDNNGNIEETRRQLLDILHQWDLLDKGGSGHHHHHH

SEQ ID NO: 4431 - DNA, 639 bp, synthetic construct
  misc_feature 1..639: note = Variant of 3'O-kinase
  source 1..639: mol_type = other DNA
atggcggttaccattggtttaacaggagggatcgcagcgggcaaatcgagtgtgagtgccatgatgcgtgaactgggtctgccggtcatcgatgctgacgaggcagcacgcgccgttatgaagccaggcgaagaagcgtatcgcgacattgtagctgaattcggtccgggcatcctgcgtgcggatgaggagatcgatcgccagaaactgggtgctatccgcttttcggacgaacaacaacgtaaggtgctgaattcgattgtaggtcctgcagtcctgaagaagatgctcgctgagtgggaagctcatatcgggtcaggcgccaagacggttgtgctggatatcccgctgctgttcgaatccggattgcaaagttgggtcgacaaagttctcgtggtgtacgtcgatgatgatgttcagttacgccgccttatggcacgtaacgggtttactgaagaagaagctctgaagcgcattcgttcacagtggcccagtgcggagaaagttaaacgtgcagacgctgtcatcgacaataatggcaatattgaagaaacccgccgccagctgctggacattttacaccagtgggatctgctggacaagggtggctccggccaccatcatcaccatcactaatga

SEQ ID NO: 4432 - protein, 211 aa, synthetic construct
  REGION 1..211: note = Variant of 3'O-kinase
MAVTIGLTGGIAAGKSSVSAMMRELGLPVIDADEAARAVMKPGEEAYRDIVAEFGPGILRADEEIDRQKLGAIRFSDEQQRKVLNSIVGPAVLKKMLAEWEAHIGSGAKTVVLDIPLLFESGLQSWVDKVLVVYVDDDVQLRRLMARNGFTEEEALKRIRSQWPSAEKVKRADAVIDNNGNIEETRRQLLDILHQWDLLDKGGSGHHHHHH

SEQ ID NO: 4433 - DNA, 639 bp, synthetic construct
  misc_feature 1..639: note = Variant of 3'O-kinase
  source 1..639: mol_type = other DNA
atggcggtgaccattggtctgacaggagggatcgcagcgggcaaatcgactgtgagtgccatgatgcgtgaactgggtctggttgtcatcgatgctgacgaggcagcacgcgccgttatgaagccaggcgaagaagcgtatcgcgacattgtggctgaattcggtccgggcatccttcgtgcggatggcgagatcgatcgccagaaactgggtgctatccgcttttcggacgaacaacaacgtaaggtgctgaattcgattgtaggtcctgcagtcctgaagaagatgctcgctgagtgggaagctcatatcgggtcaggcgccaagacggttgtgctggatatcccgctgctgttcgaatccggattgcaatcgtgggtcgacaaagttctcgtggtgtacgtcgatgatgatgttcagttacgccgccttatggcacgtaacgggtttactgaagaagaagctctgaagcgcattcgttcacagtggcccagtgcggagaaagttaaacgtgcagacgctgtcatcgacaataatggcaatattgaagaaacccgccgccagctgctggacattttacaccagtgggatctgctggacaagggtggctccggccaccatcatcaccatcactaatga

SEQ ID NO: 4434 - protein, 211 aa, synthetic construct
  REGION 1..211: note = Variant of 3'O-kinase
MAVTIGLTGGIAAGKSTVSAMMRELGLVVIDADEAARAVMKPGEEAYRDIVAEFGPGILRADGEIDRQKLGAIRFSDEQQRKVLNSIVGPAVLKKMLAEWEAHIGSGAKTVVLDIPLLFESGLQSWVDKVLVVYVDDDVQLRRLMARNGFTEEEALKRIRSQWPSAEKVKRADAVIDNNGNIEETRRQLLDILHQWDLLDKGGSGHHHHHH

SEQ ID NO: 4435 - DNA, 639 bp, synthetic construct
  misc_feature 1..639: note = Variant of 3'O-kinase
  source 1..639: mol_type = other DNA
atggcggttaccattggtttaacaggagggatcgcagcgggcaaatcgactgtgagtgccatgatgcgtgaactgggtctgccggtcatcgatgctgacgaggcagcacgcgccgttatgaagccaggcgaagaagcgtatcgcgacattgtagctgaattcggtccgggcatcagtcgtgcggatggcgagatcgatcgccagaaactgggtgctatccgcttttcggacgaacaacaacgtaaggtgctgaattcgattgtaggtcctgcagtcctgaagaagatgctcgctgagtgggaagctcattttgggtcaggcgccaagacggttgtgctggatatcccgctgctgttcgaatccggattgcaacgttgggtcgacaaagttctcgtggtgtacgtcgatgatgatgttcagttacgccgccttatggcacgtaacgggtttactgaagaagaagctctgaagcgcattcgttcacagtggcccagtgcggagaaagttaaacgtgcagacgctgtcatcgacaataatggcaatattgaagaaacccgccgccagctgctggacattttacaccagtgggatctgctggacaagggtggctccggccaccatcatcaccatcactaatga

SEQ ID NO: 4436 - protein, 211 aa, synthetic construct
  REGION 1..211: note = Variant of 3'O-kinase
MAVTIGLTGGIAAGKSTVSAMMRELGLPVIDADEAARAVMKPGEEAYRDIVAEFGPGISRADGEIDRQKLGAIRFSDEQQRKVLNSIVGPAVLKKMLAEWEAHFGSGAKTVVLDIPLLFESGLQRWVDKVLVVYVDDDVQLRRLMARNGFTEEEALKRIRSQWPSAEKVKRADAVIDNNGNIEETRRQLLDILHQWDLLDKGGSGHHHHHH

SEQ ID NO: 4437 - DNA, 639 bp, synthetic construct
  misc_feature 1..639: note = Variant of 3'O-kinase
  source 1..639: mol_type = other DNA
atggcggttaccattggtttaacaggagggatcgcagctggcaagtcgactgtgagcgccatggctcgtgaactgggtctgccggtcatcgatgctgacgaggcagcacgcgccgttatgaagccaggcgaagaagcgtatcgcgacattgtagctgaattctacccgggcatccttcgtgcggatggcgagatcgatcgccagaaactgggtgctatccgcttttcggacgaacaacaacgtaaggtgctgaattcgattgtaggtcctgcagtcctgaagaagatgctcattgagtgggaagctcatatcgggtcaggcgccaagacggttgtgctggatatcccgctgctgttcgaatccggattgcaatcgtggatggacaaagttctcgtggtgtacgtcgatgatgatgttcagttacgccgccttatggcacgtaacgggtttactgaagaagaagctctgaagcgcattcgttcacagtggcccagtgcggagaaagttaaacgtgcagacgctgtcatcgacaataatggcaatattgaagaaacccgccgccagctgctggacattttacaccagtgggatctgctggacaagggtggctccggccaccatcatcaccatcactaatga

SEQ ID NO: 4438 - protein, 211 aa, synthetic construct
  REGION 1..211: note = Variant of 3'O-kinase
MAVTIGLTGGIAAGKSTVSAMARELGLPVIDADEAARAVMKPGEEAYRDIVAEFYPGILRADGEIDRQKLGAIRFSDEQQRKVLNSIVGPAVLKKMLIEWEAHIGSGAKTVVLDIPLLFESGLQSWMDKVLVVYVDDDVQLRRLMARNGFTEEEALKRIRSQWPSAEKVKRADAVIDNNGNIEETRRQLLDILHQWDLLDKGGSGHHHHHH

SEQ ID NO: 4439 - DNA, 639 bp, synthetic construct
  misc_feature 1..639: note = Variant of 3'O-kinase
  source 1..639: mol_type = other DNA
atggcggttaccattggtttaacaggagggatcgcagcgggcaaatcgagtgtgagtgccatgatgcgtgaactgggtctgccggtcatcgatgctgacgaggcagcacgcgccgttatgaagccaggcgaagaagcgtatcgcgacattgtagctgaattcggtccgggcatcctgcgtgcggatagtgagatcgatcgccagaaactgggtgctatccgcttttcggacgaacaacaacgtaaggtgctgaattcgattgtaggtcctgcagtcctgaagaagatgctcgctgagtgggaagctcataatgggtcaggcgccaagacggttgtgctggatatcccgctgctgttcgaatccggattgcaatcgtgggtcgacaaagttctcgtggtgtacgtcgatgatgatgttcagttacgccgccttatggcacgtaacgggtttactgaagaagaagctctgaagcgcattcgttcacagtggcccagtgcggagaaagttaaacgtgcagacgctgtcatcgacaataatggcaatattgaagaaacccgccgccagctgctggacattttacaccagtgggatctgctggacaagggtggctccggccaccatcatcaccatcactaatga

SEQ ID NO: 4440 - protein, 211 aa, synthetic construct
  REGION 1..211: note = Variant of 3'O-kinase
MAVTIGLTGGIAAGKSSVSAMMRELGLPVIDADEAARAVMKPGEEAYRDIVAEFGPGILRADSEIDRQKLGAIRFSDEQQRKVLNSIVGPAVLKKMLAEWEAHNGSGAKTVVLDIPLLFESGLQSWVDKVLVVYVDDDVQLRRLMARNGFTEEEALKRIRSQWPSAEKVKRADAVIDNNGNIEETRRQLLDILHQWDLLDKGGSGHHHHHH

SEQ ID NO: 4441 - DNA, 639 bp, synthetic construct
  misc_feature 1..639: note = Variant of 3'O-kinase
  source 1..639: mol_type = other DNA
atggcggttaccattggtttaacaggagggatcgcagcgggcaaatcgactgtgagtgccatgatgcgtgaagcgggtctgccggtcatcgatgctgacgaggcacgccgcgccgttatgaagccaggcgaagaagcgtatcgcgacattgtagctgaattcggtccgggcatccttcgtgcggatggcgagatcgatcgccagaaactgggtgctatccgcttttcggacgaacaacaacgtaaggtgctgaattcgattgtaggtcctgcagtcctgaagaagatgctcgctgagtgggaagctcatatcgggtcaggcgccaagacggttgtgctggatatcccgctgctgttcgaatccggattgcaatcggtggtcgacaaagttctcgtggtgtacgtcgatgatgatgttcagttacgccgccttatggcacgtaacgggtttactgaagaagaagctctgaagcgcattcgttcacagtggcccagtgcggagaaagttaaacgtgcagacgctgtcatcgacaataatggcaatattgaagaaacccgccgccagctgctggacattttacaccagtgggatctgctggacaagggtggctccggccaccatcatcaccatcactaatga

SEQ ID NO: 4442 - protein, 211 aa, synthetic construct
  REGION 1..211: note = Variant of 3'O-kinase
MAVTIGLTGGIAAGKSTVSAMMREAGLPVIDADEARRAVMKPGEEAYRDIVAEFGPGILRADGEIDRQKLGAIRFSDEQQRKVLNSIVGPAVLKKMLAEWEAHIGSGAKTVVLDIPLLFESGLQSVVDKVLVVYVDDDVQLRRLMARNGFTEEEALKRIRSQWPSAEKVKRADAVIDNNGNIEETRRQLLDILHQWDLLDKGGSGHHHHHH

SEQ ID NO: 4443 - DNA, 639 bp, synthetic construct
  misc_feature 1..639: note = Variant of 3'O-kinase
  source 1..639: mol_type = other DNA
atggcggttaccattggtttaacaggagggatcgcagctggcaagtcgactgtgagcgccatgatgcgtgaactgggtctgccggtcatcgatgctgacgaggcagcacgcgccgttatgaagccaggcgaagaagcgtatcgcgacattgtagctgaattcggtccgggcatccttcgtgcggatggcgagatcgatcgccagaaactgggtgctatccgcttttcggacgaacaacaacgtaaggtgctgaattcgattgtaggtcctgcagtcctgaagaagatgctcattgagtgggaagctcatatcgggtcaggcgccaagacggttgtgctggatatcccgctgctgttcgaatccggattgcaatcgtgggtcgacaaagttctcgtggtgtacgtcgatgatgatgttcagttacgccgccttatggcacgtaacgggtttactgaagaagaagctctgaagcgcattcgttcacagtggcccagtgcggataaagttaaaatggcagacgctgtcatcgacaataatggcaatattgaagaaacccgccgccagctgctggacattttacaccagtgggatctgctggacaaaggtggctccggccaccatcatcaccatcactaatga

SEQ ID NO: 4444 - protein, 211 aa, synthetic construct
  REGION 1..211: note = Variant of 3'O-kinase
MAVTIGLTGGIAAGKSTVSAMMRELGLPVIDADEAARAVMKPGEEAYRDIVAEFGPGILRADGEIDRQKLGAIRFSDEQQRKVLNSIVGPAVLKKMLIEWEAHIGSGAKTVVLDIPLLFESGLQSWVDKVLVVYVDDDVQLRRLMARNGFTEEEALKRIRSQWPSADKVKMADAVIDNNGNIEETRRQLLDILHQWDLLDKGGSGHHHHHH

SEQ ID NO: 4445 - DNA, 639 bp, synthetic construct
  misc_feature 1..639: note = Variant of 3'O-kinase
  source 1..639: mol_type = other DNA
atggcggttaccattggtttaacaggagggatcgcagcgggcaaatcgactgtgagtgccatgatgcgtgaactgggtctgccggtcatcgatgctgacgaggcagcacgcgccgttatgaagccaggcgaagaagcgtatcgcgacattgtagctgaattcggtccgggcatcctgcgtgcggatggggagatcgatcgccagaaactgggtgctatccgcttttcggacgaaaaccaacgtaaggtgctgaattcgattgtaggtcctgcagtcctgaagaagatgctcgctgagtgggaagctcatattgggtcaggcgccaagacggttgtgctggatatcccgctgctgttcgaatccggattgcaacgttgggtcgactcggttctcgtggtgtacgtcgatgatgatgttcagttacgccgccttatggcacgtaacgggtttactgaagaagaagctctgaagcgcattcgttcacagtggcccagtgcggagaaagttaaacgtgcagacgctgtcatcgacaataatggcaatattgaagaaacccgccgccagctgctggacattttacaccagtgggatctgctggacaagggtggctccggccaccatcatcaccatcactaatga

SEQ ID NO: 4446 - protein, 211 aa, synthetic construct
  REGION 1..211: note = Variant of 3'O-kinase
MAVTIGLTGGIAAGKSTVSAMMRELGLPVIDADEAARAVMKPGEEAYRDIVAEFGPGILRADGEIDRQKLGAIRFSDENQRKVLNSIVGPAVLKKMLAEWEAHIGSGAKTVVLDIPLLFESGLQRWVDSVLVVYVDDDVQLRRLMARNGFTEEEALKRIRSQWPSAEKVKRADAVIDNNGNIEETRRQLLDILHQWDLLDKGGSGHHHHHH

SEQ ID NO: 4447 - DNA, 639 bp, synthetic construct
  misc_feature 1..639: note = Variant of 3'O-kinase
  source 1..639: mol_type = other DNA
atggcggtcaccattggtttaacaggagggatcgcagcgggcaaatcgactgtgagtgccatgatgcgtgaactgggtctgccggtcatcgatgctgacgaggcagcacgcgccgttatgaagccaggctgtgaagcgtatcgcgacattgtagctgaattcggtccgggcattcttctggaagatggcgagatcgatcgccagaaactgggtgctatccgcttttcggacgaacaacaacgtaaggtgctgaattcgattgtaggtcctgcagtcctgaagaagatgctcgctgagtgggaagctcatatcgggtcaggcgccaagacggttgtgctggatatcccgctgctgttcgaatccggattgcaatcgatggtcgacaaagttctcgtggtgtacgtcgatgatgatgttcagttacgccgccttatggcacgtaacgggtttactgaagaagaagctctgaagcgcattcgttcacagtggcccagtgcggagaaagttaaacgtgcagacgctgtcatcgacaataatggcaatattgaagaaacccgccgccagctgctggacattttacaccagtgggatctgctggacaagggtggctccggccaccatcatcaccatcactaatga

SEQ ID NO: 4448 - protein, 211 aa, synthetic construct
  REGION 1..211: note = Variant of 3'O-kinase
MAVTIGLTGGIAAGKSTVSAMMRELGLPVIDADEAARAVMKPGCEAYRDIVAEFGPGILLEDGEIDRQKLGAIRFSDEQQRKVLNSIVGPAVLKKMLAEWEAHIGSGAKTVVLDIPLLFESGLQSMVDKVLVVYVDDDVQLRRLMARNGFTEEEALKRIRSQWPSAEKVKRADAVIDNNGNIEETRRQLLDILHQWDLLDKGGSGHHHHHH

SEQ ID NO: 4449 - DNA, 639 bp, synthetic construct
  misc_feature 1..639: note = Variant of 3'O-kinase
  source 1..639: mol_type = other DNA
atggcggttaccattggtttaacaggagggatcgcagctggcaagtcgactgtgagcgccatggctcgtgaactgggtctgccggtcatcgatgctgacgaggcagcacgcgccgttatgaagccaggcgaagaagcgtatcgcgacattgtagctgaattctacccgggcatccttcgtgcggatggcgagatcgatcgccagaaactgggtgctatccgcttttcggacgaacaacaacgtaaggtgctgaattcgattgtaggtcctgcagtcctgaagaagatgctcctggagtgggaagctcatatcgggtcaggcgccaagacggttgtgctggatatcccgctgctgttcgaatccggattgcaatcgtgggtcgacaaagttctcgtggtgtacgtcgatgatgatgttcagttacgccgccttatggcacgtaacgggtttactgaagaagaagctctgaagcgcattcgttcacagtggcccagtgcggataaagttaaagtggcagccgctgtcatcgacaataatggcaatattgaagaaacccgccgccagctgctggacattttacaccagtgggttctgctggacaaaggtggctccggccaccatcatcaccatcactaatga

SEQ ID NO: 4450 - protein, 211 aa, synthetic construct
  REGION 1..211: note = Variant of 3'O-kinase
MAVTIGLTGGIAAGKSTVSAMARELGLPVIDADEAARAVMKPGEEAYRDIVAEFYPGILRADGEIDRQKLGAIRFSDEQQRKVLNSIVGPAVLKKMLLEWEAHIGSGAKTVVLDIPLLFESGLQSWVDKVLVVYVDDDVQLRRLMARNGFTEEEALKRIRSQWPSADKVKVAAAVIDNNGNIEETRRQLLDILHQWVLLDKGGSGHHHHHH

SEQ ID NO: 4451 - DNA, 639 bp, synthetic construct
  misc_feature 1..639: note = Variant of 3'O-kinase
  source 1..639: mol_type = other DNA
atggcggttaccattggtttaacaggagggatcgcagcgggcaaatcgactgtgagtgccatgatgcgtgaactgggtctgccggtcatcgatgctgacgaggcagcacgcgccgttatgaagccaggcgaagaagcgtatcgcgacattgtagctgaattcggtccgggcatcctgcgtgcggatagtgagatcgatcgccagaaactgggtgctatccgcttttcggacgaacaacaacgtaaggtgctgaattcgattgtaggtcctgcagtcctgaagaagatgctcgctgagtgggaagctcatatcgggtcaggcgccaagacggttgtgctggatatcccgctgctgttcgaatccggattgcaatattgggtcgacaaagttctcgtggtgtacgtcgatgatgatgttcagttacgccgccttatggcacgtaacgggtttactgaagaagaagctctgaagcgcattcgttcacagtggcccagtgcggagaaagttaaacgtgcagacgctgtcatcgacaataatggcaatattgaagaaacccgccgccagctgctggacattttacaccagtgggatctgctggacaagggtggctccggccaccatcatcaccatcactaatga

SEQ ID NO: 4452 - protein, 211 aa, synthetic construct
  REGION 1..211: note = Variant of 3'O-kinase
MAVTIGLTGGIAAGKSTVSAMMRELGLPVIDADEAARAVMKPGEEAYRDIVAEFGPGILRADSEIDRQKLGAIRFSDEQQRKVLNSIVGPAVLKKMLAEWEAHIGSGAKTVVLDIPLLFESGLQYWVDKVLVVYVDDDVQLRRLMARNGFTEEEALKRIRSQWPSAEKVKRADAVIDNNGNIEETRRQLLDILHQWDLLDKGGSGHHHHHH

SEQ ID NO: 4453 - DNA, 639 bp, synthetic construct
  misc_feature 1..639: note = Variant of 3'O-kinase
  source 1..639: mol_type = other DNA
atggcggttaccattggtttaacaggagggatcgcagcgggcaaatcgactgtgagtgccatgatgcgtgaagcgggtctgccggcgatcgatgctgacgaggcagcacgcgccgttatgaagccaggcgaagaagcgtatcgcgacattgtagctgaattcggtccgggcattctttgtgcagatggcgagatcgatcgccagaaactgggtgctatccgcttttcggacgaacaacaacgtaaggtgctgaattcgattgtaggtcctgcagtcctgaagaagatgctcgctgagtgggaagctcatatcgggtcaggcgccaagacggttgtgctggatatcccgctgctgttcgaatccggattgcaatcgctggtcgacaaagttctcgtggtgtacgtcgatgatgatgttcagttacgccgccttatggcacgtaacgggtttactgaagaagaagctctgaagcgcattcgttcacagtggcccagtgcggagaaagttaaacgtgcagacgctgtcatcgacaataatggcaatattgaagaaacccgccgccagctgctggacattttacaccagtgggatctgctggacaagggtggctccggccaccatcatcaccatcactaatga

SEQ ID NO: 4454 - protein, 211 aa, synthetic construct
  REGION 1..211: note = Variant of 3'O-kinase
MAVTIGLTGGIAAGKSTVSAMMREAGLPAIDADEAARAVMKPGEEAYRDIVAEFGPGILCADGEIDRQKLGAIRFSDEQQRKVLNSIVGPAVLKKMLAEWEAHIGSGAKTVVLDIPLLFESGLQSLVDKVLVVYVDDDVQLRRLMARNGFTEEEALKRIRSQWPSAEKVKRADAVIDNNGNIEETRRQLLDILHQWDLLDKGGSGHHHHHH

SEQ ID NO: 4455 - DNA, 639 bp, synthetic construct
  misc_feature 1..639: note = Variant of 3'O-kinase
  source 1..639: mol_type = other DNA
atggcggttaccattggtttaacaggagggatcgcagcgggcaaatcgactgtgagtgccatgatgcgtgaactgggtctgccggtcatcgatgctgacgaggcagcacgcgccgttatgaagccaggcgaagaagcgtatcgcgacattgtagctgaattcgggccgggcatccttcgtgcggatggcgagatcgatcgccagaaactggccgctatccgcttttcggacgaacaacaacgtaaggtgctgaattcgattgtaggtcctgcagtcctgaagaagatgctcgcggagtgggaagctcatatcgggtcaggcgccaagacggttgtgctggatatcccgctgctgttcgaatccggattgcaatcgtggatggacaaagttctcgtggtgtacgtcgatgatgatgttcagttacgccgccttatggcacgtaacgggtttactgaagaagaagctctgaagcgcattcgttcacagtggcccagtgcggagaaagttaaacgtgcagacgctgtcatcgacaataatggcaatattgaagatacccgccgccagctgctggacattttacaccagtgggatctgctggacaaaggtggctccggccaccatcatcaccatcactaatga

SEQ ID NO: 4456 - protein, 211 aa, synthetic construct
  REGION 1..211: note = Variant of 3'O-kinase
MAVTIGLTGGIAAGKSTVSAMMRELGLPVIDADEAARAVMKPGEEAYRDIVAEFGPGILRADGEIDRQKLAAIRFSDEQQRKVLNSIVGPAVLKKMLAEWEAHIGSGAKTVVLDIPLLFESGLQSWMDKVLVVYVDDDVQLRRLMARNGFTEEEALKRIRSQWPSAEKVKRADAVIDNNGNIEDTRRQLLDILHQWDLLDKGGSGHHHHHH

SEQ ID NO: 4457 - DNA, 639 bp, synthetic construct
  misc_feature 1..639: note = Variant of 3'O-kinase
  source 1..639: mol_type = other DNA
atggcggttaccattggtttaacaggagggatcgcagcgggcaaatcgactgtgagtgccatgatgcgtgaactgggttttccggtcatcgatgctgacgaggcagcacgcgccgttatgaagccaggcgaagaagcgtatcgcgacattgtagctgaattcgggccgggcatccttcgtgcggatggcgagatcgatcgccagaaactgcaagctatccgcttttcggacgaacaacaacgtaaggtgctgaattcgattgtaggtcctgcagtcctgaagaagatgctcgcggagtgggaagctcatatcgggtcaggcgccaagacggttgtgctggatatcccgctgctgttcgaatccggattgcaatcgtggatggacaaagttctcgtggtgtacgtcgatgatgatgttcagttacgccgccttatggcacgtaacgggtttactgaagaagaagctctgaagcgcattcgttcacagtggcccagtgcggagaaagttaaacgtgcagacgctgtcatcgacaataatggcaatattgaagaaacccgccgccagctgctggacattttacaccagtgggatctgctggacaaaggtggctccggccaccatcatcaccatcactaatga

SEQ ID NO: 4458 - protein, 211 aa, synthetic construct
  REGION 1..211: note = Variant of 3'O-kinase
MAVTIGLTGGIAAGKSTVSAMMRELGFPVIDADEAARAVMKPGEEAYRDIVAEFGPGILRADGEIDRQKLQAIRFSDEQQRKVLNSIVGPAVLKKMLAEWEAHIGSGAKTVVLDIPLLFESGLQSWMDKVLVVYVDDDVQLRRLMARNGFTEEEALKRIRSQWPSAEKVKRADAVIDNNGNIEETRRQLLDILHQWDLLDKGGSGHHHHHH

SEQ ID NO: 4459 - DNA, 639 bp, synthetic construct
  misc_feature 1..639: note = Variant of 3'O-kinase
  source 1..639: mol_type = other DNA
atggcggttaccattggtttaacaggagggatcgcagcgggcaaatcgactgtgagtgccatgatgcgtgaactgggttttccggtcatcgatgctgacgaggcagcacgcgccgttatgaagccaggcgaagaagcgtatcgcgacattgtagctgaattcgggccgggcatccttcgtgcggatggcgagatcgatcgcgggaaactggccgctatccgcttttcggacgaacaacaacgtaaggtgctgaattcgattgtaggtcctgcagtcctgaagaagatgctcgcggagtgggaagctcatatcgggtcaggcgccaagacggttgtgctggatatcccgctgctgttcgaatccggattgcaatcgtggatggacaaagttctcgtggtgtacgtcgatgatgatgttcagttacgccgccttatggcacgtaacgggtttactgaagaagaagctctgaagcgcattcgttcacagtggcccagtgcggagaaagttaaacgtgcagacgctgtcatcgacaataatggcaatattgaagatacccgccgccagctgctggacattttacaccagtgggatctgctggacaaaggtggctccggccaccatcatcaccatcactaatga

SEQ ID NO: 4460 - protein, 211 aa, synthetic construct
  REGION 1..211: note = Variant of 3'O-kinase
MAVTIGLTGGIAAGKSTVSAMMRELGFPVIDADEAARAVMKPGEEAYRDIVAEFGPGILRADGEIDRGKLAAIRFSDEQQRKVLNSIVGPAVLKKMLAEWEAHIGSGAKTVVLDIPLLFESGLQSWMDKVLVVYVDDDVQLRRLMARNGFTEEEALKRIRSQWPSAEKVKRADAVIDNNGNIEDTRRQLLDILHQWDLLDKGGSGHHHHHH

SEQ ID NO: 4461 - DNA, 639 bp, synthetic construct
  misc_feature 1..639: note = Variant of 3'O-kinase
  source 1..639: mol_type = other DNA
atggcggttaccattggtttaacaggagggatcgcagcgggcaaatcgactgtgagtgccatgatgcgtgaactgggtctgccggtcatcgatgctgacgaggcagcacgcgccgttatgaagccaggcgaagaagcgtatcgcgacattgtagctgaattcgggccgggcatccttcgtgcggatggcgagatcgatcgccagaaactggccgctatccgcttttcggacgaacaacaacgtaaggtgctgaattcgattgtaggtcctgcagtcctgaagaagatgctcgcggagtgggaagctcatatcgggtcaggcgccaagacggttgtgctggatatcccgctgctgttcgaatccggattgcaatcgtggatggacaaagttctcgtggtgtacgtcgatgatgatgttcagttacgccgccttatggcacgtaacgggtttactgaagaagaagctctgaagcgcattcgttcacagtggcccagtgcggagaaagttaaacgtgcagacgctgtcatcgacaataatggcaatattgaagaaacccgccgccagctgctggacattttacaccagtgggatctgctggacaaaggtggctccggccaccatcatcaccatcactaatga

SEQ ID NO: 4462 - protein, 211 aa, synthetic construct
  REGION 1..211: note = Variant of 3'O-kinase
MAVTIGLTGGIAAGKSTVSAMMRELGLPVIDADEAARAVMKPGEEAYRDIVAEFGPGILRADGEIDRQKLAAIRFSDEQQRKVLNSIVGPAVLKKMLAEWEAHIGSGAKTVVLDIPLLFESGLQSWMDKVLVVYVDDDVQLRRLMARNGFTEEEALKRIRSQWPSAEKVKRADAVIDNNGNIEETRRQLLDILHQWDLLDKGGSGHHHHHH

SEQ ID NO: 4463 - DNA, 639 bp, synthetic construct
  misc_feature 1..639: note = Variant of 3'O-kinase
  source 1..639: mol_type = other DNA
atggcggttaccattggtttaacaggagggatcgcagcgggcaaatcgactgtgagtgccatgatgcgtgaactgggttttccggtcatcgatgctgacgaggcagcacgcgccgttatgaagccaggcgaagaagcgtatcgcgacattgtagctgaattcgggccgggcatccttcgtgcggatggcgagatcgatcgccagaaactgactgctatccgcttttcggacgaacaacaacgtaaggtgctgaattcgattgtaggtcctgcagtcctgaagaagatgctcgcggagtgggaagctcatatcgggtcaggcgccaagacggttgtgctggatatcccgctgctgttcgaatccggattgcaatcgtggatggacaaagttctcgtggtgtacgtcgatgatgatgttcagttacgccgccttatggcacgtaacgggtttactgaagaagaagctctgaagcgcattcgttcacagtggcccagtgcggagaaagttaaacgtgcagacgctgtcatcgacaataatggcaatattgaagatacccgccgccagctgctggacattttacaccagtgggatctgctggacaaaggtggctccggccaccatcatcaccatcactaatga

SEQ ID NO: 4464 - protein, 211 aa, synthetic construct
  REGION 1..211: note = Variant of 3'O-kinase
MAVTIGLTGGIAAGKSTVSAMMRELGFPVIDADEAARAVMKPGEEAYRDIVAEFGPGILRADGEIDRQKLTAIRFSDEQQRKVLNSIVGPAVLKKMLAEWEAHIGSGAKTVVLDIPLLFESGLQSWMDKVLVVYVDDDVQLRRLMARNGFTEEEALKRIRSQWPSAEKVKRADAVIDNNGNIEDTRRQLLDILHQWDLLDKGGSGHHHHHH

SEQ ID NO: 4465 - DNA, 639 bp, synthetic construct
  misc_feature 1..639: note = Variant of 3'O-kinase
  source 1..639: mol_type = other DNA
atggcggttaccattggtttaacaggagggatcgcagcgggcaaatcgactgtgagtgccatgatgcgtgaactgggtctgccggtcatcgatgctgacgaggcagcacgcgccgttatgaagccaggcgaagaagcgtatcgcgacattgtagctgaattcgggccgggcatccttcgtgcggatggcgagatcgatcgcgggaaactgcgtgctatccgcttttcggacgaacaacaacgtaaggtgctgaattcgattgtaggtcctgcagtcctgaagaagatgctcgcggagtgggaagctcatatcgggtcaggcgccaagacggttgtgatggatattccgctgctgttcgaatccggattgcaatcgtggatggacaaagttctcgtggtgtacgtcgatgatgatgttcagttacgccgccttatggcacgtaacgggtttactgaagaagaagctctgaagcgcattcgttcacagtggcccagtgcggagaaagttaaacgtgcagacgctgtcatcgacaataatggcaatattgaagaaacccgccgccagctgctggacattttacaccagtgggatctgctggacaaaggtggctccggccaccatcatcaccatcactaatga

SEQ ID NO: 4466 - protein, 211 aa, synthetic construct
  REGION 1..211: note = Variant of 3'O-kinase
MAVTIGLTGGIAAGKSTVSAMMRELGLPVIDADEAARAVMKPGEEAYRDIVAEFGPGILRADGEIDRGKLRAIRFSDEQQRKVLNSIVGPAVLKKMLAEWEAHIGSGAKTVVMDIPLLFESGLQSWMDKVLVVYVDDDVQLRRLMARNGFTEEEALKRIRSQWPSAEKVKRADAVIDNNGNIEETRRQLLDILHQWDLLDKGGSGHHHHHH

SEQ ID NO: 4467 - DNA, 639 bp, synthetic construct
  misc_feature 1..639: note = Variant of 3'O-kinase
  source 1..639: mol_type = other DNA
atggcggttaccattggtttaacaggagggatcgcagcgggcaaatcgactgtgagtgccatgatgcgtgaactgggtctgccggtcatcgatgctgacgaggcagcacgcgccgttatgaagccaggcgaagaagcgtatcgcgacattgtagctgaattcgggccgggcatccttcgtgcggatggcgagatcgatcgcgggaaactgcgtgctatccgcttttcggacgaacaacaacgtaaggtgctgaattcgattgtaggtcctgcagtcctgaagaagatgctcgcggagtgggaagctcatatcgggtcaggcgccaagacggttgtgctggatatcccgctgctgttcgaatccggattgcaatcgtggatggacaaagttctcgtggtgtacgttgatgatgatgttcagttacgccgccttatggcacgtaacgggtttactgaagaagaagctctgatgcgcattcgttcacagtggcccagtgcggagaaagttaaacgtgcagacgctgtcatcgacaataatggcaatattgaagatacccgccgccagctgctggacattttacaccagtgggatctgctggacaaaggtggctccggccaccatcatcaccatcactaatga

SEQ ID NO: 4468 - protein, 211 aa, synthetic construct
  REGION 1..211: note = Variant of 3'O-kinase
MAVTIGLTGGIAAGKSTVSAMMRELGLPVIDADEAARAVMKPGEEAYRDIVAEFGPGILRADGEIDRGKLRAIRFSDEQQRKVLNSIVGPAVLKKMLAEWEAHIGSGAKTVVLDIPLLFESGLQSWMDKVLVVYVDDDVQLRRLMARNGFTEEEALMRIRSQWPSAEKVKRADAVIDNNGNIEDTRRQLLDILHQWDLLDKGGSGHHHHHH

SEQ ID NO: 4469 - DNA, 639 bp, synthetic construct
  misc_feature 1..639: note = Variant of 3'O-kinase
  source 1..639: mol_type = other DNA
atggcggttaccattggtttaacaggagggatcgcagcgggcaaatcgactgtgagtgccatgatgcgtgaactgggttttccggtcatcgatgctgacgaggcagcacgcgccgttatgaagccaggcgaagaagcgtatcgcgacattgtagctgaattcgggccgggcatccttcgtgcggatggcgagatcgatcgccagaaactgggtgctatccgcttttcggacgaacaacaacgtaaggtgctgaattcgattgtaggtcctgcagtcctgaagaagatgctcgcggagtgggaagctcatatcgggtcaggcgccaagacggttgtgctggatatcccgctgctgttcgaatccggattgcaatcgtggatggacaaagttctcgtggtgtacgtcgatgatgatgttcagttacgccgccttatggcacgtaacgggtttactgaagaagaagctctgaagcgcattcgttcacagtggcccagtgcggagaaagttaaacgtgcagacgctgtcatcgacaataatggcaatattgaagaaacccgccgccagctgctggacattttacaccagtgggatctgctggacaaaggtggctccggccaccatcatcaccatcactaatga

SEQ ID NO: 4470 - protein, 211 aa, synthetic construct
  REGION 1..211: note = Variant of 3'O-kinase
MAVTIGLTGGIAAGKSTVSAMMRELGFPVIDADEAARAVMKPGEEAYRDIVAEFGPGILRADGEIDRQKLGAIRFSDEQQRKVLNSIVGPAVLKKMLAEWEAHIGSGAKTVVLDIPLLFESGLQSWMDKVLVVYVDDDVQLRRLMARNGFTEEEALKRIRSQWPSAEKVKRADAVIDNNGNIEETRRQLLDILHQWDLLDKGGSGHHHHHH

SEQ ID NO: 4471 - DNA, 639 bp, synthetic construct
  misc_feature 1..639: note = Variant of 3'O-kinase
  source 1..639: mol_type = other DNA
atggcggttaccattggtttaacaggagggatcgcagcgggcaaatcgactgtgagtgccatgatgcgtgaactgggtctgccggtcatcgatgctgacgaggcagcacgcgccgttatgaagccaggcgaagaagcgtatcgcgacattgtagctgaattcgggccgggcatccttcgtgcggatggcgagatcgatcgcgggaaactgcaagctatccgcttttcggacgaacaacaacgtaaggtgctgaattcgattgtaggtcctgcagtcctgaagaagatgctcgcggagtgggaagctcatatcgggtcaggcgccaagacggttgtgatggatattccgctgctgttcgaatccggattgcaatcgtggatggacaaagttctcgtggtgtacgtcgatgatgatgttcagttacgccgccttatggcacgtaacgggtttactgaagaagaagctctgcgccgcattcgttcacagtggcccagtgcggagaaagttaaacgtgcagacgctgtcctggacaataatggcaatattgaagaaacccgccgccagctgctggacattttacaccagtgggatctgctggacaaaggtggctccggccaccatcatcaccatcactaatga

SEQ ID NO: 4472 - protein, 211 aa, synthetic construct
  REGION 1..211: note = Variant of 3'O-kinase
MAVTIGLTGGIAAGKSTVSAMMRELGLPVIDADEAARAVMKPGEEAYRDIVAEFGPGILRADGEIDRGKLQAIRFSDEQQRKVLNSIVGPAVLKKMLAEWEAHIGSGAKTVVMDIPLLFESGLQSWMDKVLVVYVDDDVQLRRLMARNGFTEEEALRRIRSQWPSAEKVKRADAVLDNNGNIEETRRQLLDILHQWDLLDKGGSGHHHHHH

SEQ ID NO: 4473 - DNA, 639 bp, synthetic construct
  misc_feature 1..639: note = Variant of 3'O-kinase
  source 1..639: mol_type = other DNA
atggcggttaccattggtttaacaggagggatcgcagcgggcaaatcgactgtgagtgccatgatgcgtgaactgggtctgccggtcatcgatgctgacgaggcagcacgcgccgttatgaagccaggcgaagaagcgtatcgcgacattgtagctgaattcgggccgggcatccttcgtgcggatggcgagatcgatcgccagaaactgactgctatccgcttttcggacgaacaacaacgtaaggtgctgaattcgattgtaggtcctgcagtcctgaagaagatgctcgcggagtgggaagctcatatcgggtcaggcgccaagacggttgtgctggatattccgctgctgttcgaatccggattgcaatcgtggatggacaaagttctcgtggtgtacgtcgatgatgatgttcagttacgccgccttatggcacgtaacgggtttactgaagaagaagctctgaagcgcattcgttcacagtggcccagtgcggagaaagttaaacgtgcagacgctgtcatcgacaataatggcaatattgaagatacccgccgccagctgctggacattttacaccagtgggatctgctggacaaaggtggctccggccaccatcatcaccatcactaatga

SEQ ID NO: 4474 - protein, 211 aa, synthetic construct
  REGION 1..211: note = Variant of 3'O-kinase
MAVTIGLTGGIAAGKSTVSAMMRELGLPVIDADEAARAVMKPGEEAYRDIVAEFGPGILRADGEIDRQKLTAIRFSDEQQRKVLNSIVGPAVLKKMLAEWEAHIGSGAKTVVLDIPLLFESGLQSWMDKVLVVYVDDDVQLRRLMARNGFTEEEALKRIRSQWPSAEKVKRADAVIDNNGNIEDTRRQLLDILHQWDLLDKGGSGHHHHHH

SEQ ID NO: 4475 - DNA, 639 bp, synthetic construct
  misc_feature 1..639: note = Variant of 3'O-kinase
  source 1..639: mol_type = other DNA
atggcggttaccattggtttaacaggagggatcgcagcgggcaaatcgactgtgagtgccatgatgcgtgaactgggtttcccggtcatcgatgctgacgaggcagcacgcgccgttatgaagccaggcgaagaagcgtatcgcgacattgtagctgaattcgggccgggcatccttcgtgcggatggcgagatcgatcgccagaaactgggtgctatccgcttttcggacgaacaacaacgtaaggtgctgaattcgattgtaggtcctgcagtcctgaagtatatgctcgcggagtgggaagctcatatcgggtcaggcgccaagacggttgtgctggatatcccgctgctgttcgaatccggattgcaatcgtggatggacaaagttctcgtggtgtacgtcgatgatgatgttcagttacgccgccttatggcccgtaacgggtttacggaagaagaagctctgaagcgcattcgttcacagtggcccagtgcggagaaagttaaacgtgcagacgctgtcatcgacaataatggcaatattgaagaaacccgccgccagctgctggacattttacaccagtgggatctgctggacaaaggtggctccggccaccatcatcaccatcactaatga

SEQ ID NO: 4476 - protein, 211 aa, synthetic construct
  REGION 1..211: note = Variant of 3'O-kinase
MAVTIGLTGGIAAGKSTVSAMMRELGFPVIDADEAARAVMKPGEEAYRDIVAEFGPGILRADGEIDRQKLGAIRFSDEQQRKVLNSIVGPAVLKYMLAEWEAHIGSGAKTVVLDIPLLFESGLQSWMDKVLVVYVDDDVQLRRLMARNGFTEEEALKRIRSQWPSAEKVKRADAVIDNNGNIEETRRQLLDILHQWDLLDKGGSGHHHHHH

SEQ ID NO: 4477 - DNA, 639 bp, synthetic construct
  misc_feature 1..639: note = Variant of 3'O-kinase
  source 1..639: mol_type = other DNA
atggcggttaccattggtttaacaggagggattgcagcgggcaaatcgactgtgagtgccatgatgcgtgaactgggtttcccggtcatcgatgctgacgaggcagcacgcgccgttatgaagccaggcgaagaagcgtatcgcgacattgtagctgaattcgggccgggcatccttcgtgcggatggcgagatcgatcgccagaaactgggtgctatccgcttttcggacgaacaacaacgtaaggtgctgaattcgattgtaggtcctgcagtcctgaagcatatgctcgcggagtgggaagctcatatcgggtcaggcgccaagacggttgtgctggatatcccgctgctgttcgaatccggattgcaatcgtggatggacaaagtcctcgtggtgtacgtcgatgatgatgttcagttacgccgccttatggcacgtaacgggtttactgaagaagaagctctgaagcgcattcgttcacagtggcccagtgcggagaaagttaaacgtgcagacgctgtcatcgacaataatggcaatattgaagaaacccgccgccagctgctggacattttacaccagtgggatctgctggacaaaggtggctccggccaccatcatcaccatcactaatga

SEQ ID NO: 4478 - protein, 211 aa, synthetic construct
  REGION 1..211: note = Variant of 3'O-kinase
MAVTIGLTGGIAAGKSTVSAMMRELGFPVIDADEAARAVMKPGEEAYRDIVAEFGPGILRADGEIDRQKLGAIRFSDEQQRKVLNSIVGPAVLKHMLAEWEAHIGSGAKTVVLDIPLLFESGLQSWMDKVLVVYVDDDVQLRRLMARNGFTEEEALKRIRSQWPSAEKVKRADAVIDNNGNIEETRRQLLDILHQWDLLDKGGSGHHHHHH

SEQ ID NO: 4479 - DNA, 639 bp, synthetic construct
  misc_feature 1..639: note = Variant of 3'O-kinase
  source 1..639: mol_type = other DNA
atggcggttaccattggtttaacaggagggatcgcagcgggcaaatcgactgtgagtgccatgatgcgtgaactgggtctgccggtcatcgatgctgacgaggcagcacgcgccgttatggcaccaggcgaagaagcgtatcgcgacattgtagctgaattcgggccgggcatccttcgtgcggatggcgagatcgatcgccagaaactgggtgacatccgcttttcggacgaacaacaacgtaaggtgctgaattcgattgtaggtcctgcagtcctgaagaagatgctcgcggagtgggaagctcatatcgggtcaggcgccaagacggttgtgctggatatcccgctgctgttcgaatccggattgcagtcgtggatggacaaagttctcgtggtgtacgtcgatgatgatgttcagttacgccgccttatggcacgtaacgggtttactgaagaagaagctctgaagcgcattagtgtccagtggcccagtgcggagaaagttaaacgtgcagacgctgtcatcgacaataatggcaatattgaagaaacccgccgccagctgctggacattttacaccagtgggatctgctggacaaaggtggctccggccaccatcatcaccatcactaatga

SEQ ID NO: 4480 - protein, 211 aa, synthetic construct
  REGION 1..211: note = Variant of 3'O-kinase
MAVTIGLTGGIAAGKSTVSAMMRELGLPVIDADEAARAVMAPGEEAYRDIVAEFGPGILRADGEIDRQKLGDIRFSDEQQRKVLNSIVGPAVLKKMLAEWEAHIGSGAKTVVLDIPLLFESGLQSWMDKVLVVYVDDDVQLRRLMARNGFTEEEALKRISVQWPSAEKVKRADAVIDNNGNIEETRRQLLDILHQWDLLDKGGSGHHHHHH

SEQ ID NO: 4481 - DNA, 639 bp, synthetic construct
  misc_feature 1..639: note = Variant of 3'O-kinase
  source 1..639: mol_type = other DNA
atggcggttaccattggtttaacaggagggatcgcagcgggcaaatcgactgtgagtgccatgatgcgtgaactgggttttccggtcatcgatgctgacgaggcagcacgcgccgttatgaagccaggcgaagaagcgtatcgcgacattgtagctgaattcgggccgggcatccttcgtgcggatggcgagatcgatcgcgggaaactgggcgctatccgcttttcggacgaacaacaacgtaaggtgctgaattcgattgtaggtcctgcagtcctgaagaagatgctcgcggagtgggaagctcatatcgggtcaggcgccaagacggttgtgctggatatcccgctgctgttcgaatccggattgcaatcgtggatggacaaagttctcgtggtgtacgttgatgatgatgttcagttacgccgccttatggcacgtaacgggtttactgaagaagaagctctgaagcgcattcgttcacagtggcccagtgcggagaaagttaaacgtgcagacgctgtcatcgacaataatggcaatattgaagaaacccgccgccagctgctggacattttacaccagtgggatctgctggacaaaggtggctccggccaccatcatcaccatcactaatga

SEQ ID NO: 4482 - protein, 211 aa, synthetic construct
  REGION 1..211: note = Variant of 3'O-kinase
MAVTIGLTGGIAAGKSTVSAMMRELGFPVIDADEAARAVMKPGEEAYRDIVAEFGPGILRADGEIDRGKLGAIRFSDEQQRKVLNSIVGPAVLKKMLAEWEAHIGSGAKTVVLDIPLLFESGLQSWMDKVLVVYVDDDVQLRRLMARNGFTEEEALKRIRSQWPSAEKVKRADAVIDNNGNIEETRRQLLDILHQWDLLDKGGSGHHHHHH

SEQ ID NO: 4483 - DNA, 639 bp, synthetic construct
  misc_feature 1..639: note = Variant of 3'O-kinase
  source 1..639: mol_type = other DNA
atggcggttaccattggtttaacaggagggatcgcagcgggcaaatcgactgtgagtgccatgatgcgtgaactgggtctgccggtcatcgatgctgacgaggcagcacgcgccgttatgaagccaggcgaagaagcgtatcgcgacattgtagctgaattcgggccgggcatccttcgtgcggatggcgagatcgatcgccagaaactgggtgctatccgcttttcggacgaacaacaacgtaaggtgctgaattcgattgtaggtcctgcagtcctgaagaagatgctcgcggagtgggaagctcatatcgggtcaggcgccaagacggttgtgctggatatcccgctgctgttcgaatccggattgcaagagtggatggacaaagttctcgtggtgtacgtcgatgatgatgttcagttacgccgccttatggcacgtaacgggtttactgaagaagaagctctgaagcgcattcgttcacagtggcccagtgcggagaaagttaaacgtgcagacgctgtcatcgacaataatggcaatattgaagaaacccgccgccagctgctggacattttacaccagtgggatctgctggacaaaggtggctccggccaccatcatcaccatcactaatga

SEQ ID NO: 4484 - protein, 211 aa, synthetic construct
  REGION 1..211: note = Variant of 3'O-kinase
MAVTIGLTGGIAAGKSTVSAMMRELGLPVIDADEAARAVMKPGEEAYRDIVAEFGPGILRADGEIDRQKLGAIRFSDEQQRKVLNSIVGPAVLKKMLAEWEAHIGSGAKTVVLDIPLLFESGLQEWMDKVLVVYVDDDVQLRRLMARNGFTEEEALKRIRSQWPSAEKVKRADAVIDNNGNIEETRRQLLDILHQWDLLDKGGSGHHHHHH

SEQ ID NO: 4485 - DNA, 639 bp, synthetic construct
  misc_feature 1..639: note = Variant of 3'O-kinase
  source 1..639: mol_type = other DNA
atggcggttaccattggtttaacaggagggatcgcagcgggcaaatcgactgtgagtgccatgatgcgtgaactgggtctgccggtcatcgatgctgacgaggcagcacgcgccgttatgaagccaggcgaagaagcgtatcgcgacattgtagctgaattcgggccgggcatccttcgtggggatggcgagatcgatcgccagaaactgggtgctatccgcttttcggacgaacaacaacgtaaggtgctgaattcgattgtaggtcctgcagtcctgaagaagatgctcgcggagtgggaagctcatatcgggtcaggcgccaagacggttgtgctggatatcccgctgctgttcgaatccggattgcaatcgtggatggacaaagttctcgtggtgtacgtcgatgatgatgttcagttacgccgccttatggcacgtaacgggtttactgaagaagaagctctgaagcgcattcgttcacagtggcccagtgcggagaaagttaaacgtgcagacgctgtcatcgacaataatggcaatattgaagaaacccgccgccagctgctggacattttacaccagtgggatctgctggacaaaggtggctccggccaccatcatcaccatcactaatga

SEQ ID NO: 4486 - protein, 211 aa, synthetic construct
  REGION 1..211: note = Variant of 3'O-kinase
MAVTIGLTGGIAAGKSTVSAMMRELGLPVIDADEAARAVMKPGEEAYRDIVAEFGPGILRGDGEIDRQKLGAIRFSDEQQRKVLNSIVGPAVLKKMLAEWEAHIGSGAKTVVLDIPLLFESGLQSWMDKVLVVYVDDDVQLRRLMARNGFTEEEALKRIRSQWPSAEKVKRADAVIDNNGNIEETRRQLLDILHQWDLLDKGGSGHHHHHH

SEQ ID NO: 4487 - DNA, 639 bp, synthetic construct
  misc_feature 1..639: note = Variant of 3'O-kinase
  source 1..639: mol_type = other DNA
atggcggttaccattggtttaacaggagggatcgcagcgggcaaatcgactgtgagtgccatgatgcgtgaactgggtctgccggtcatcgatgctgacgaggcagcacgcgccgttatgaagccaggcgaagaagcgtatcgcgacattgtagctgaattcgggccgggcatccttcgtgcggatggcgagatcgatcgccagaaactgggtgctatccgcttttcggacgaacaacaacgtaagcggctgaattcgattgtaggtcctgcagtcctgaagaagatgctcgcggagtgggaagctcatatcgggtcaggcgccaagacggttgtgctggatatcccgctgctgttcgaatccggattgcaatcgtggatggacaaagttctcgtggtgtacgtcgatgatgatgttcagttacgccgccttatggcacgtaacgggtttactgaagaagaagctctgaagcgcattcgttcacagtggcccagtgcggagaaagttaaacgtgcagacgctgtcatcgacaataatggcaatattgaagaaacccgccgccagctgctggacattttacaccagtgggatctgctggacaaaggtggctccggccaccatcatcaccatcactaatga

SEQ ID NO: 4488 - protein, 211 aa, synthetic construct
  REGION 1..211: note = Variant of 3'O-kinase
MAVTIGLTGGIAAGKSTVSAMMRELGLPVIDADEAARAVMKPGEEAYRDIVAEFGPGILRADGEIDRQKLGAIRFSDEQQRKRLNSIVGPAVLKKMLAEWEAHIGSGAKTVVLDIPLLFESGLQSWMDKVLVVYVDDDVQLRRLMARNGFTEEEALKRIRSQWPSAEKVKRADAVIDNNGNIEETRRQLLDILHQWDLLDKGGSGHHHHHH

SEQ ID NO: 4489 - DNA, 639 bp, synthetic construct
  misc_feature 1..639: note = Variant of 3'O-kinase
  source 1..639: mol_type = other DNA
atggcggttaccattggtttaacaggagggatcgcagcgggcaaatcgactgtgagtgccatgatgcgtgaactgggtctgccggtcatcgatgctgacgaggcagcacgcgccgttatgaagccaggcgaagaagcgtatcgccagattgtagctgaattcgggccgggcatccttcgtgcggatggcgagatcgatcgccagaaactgggtgctatccgcttttcggacgaacaacaacgtaaggtgctgaattcgattgtaggtcctgcagtcctgaagaagatgctcgcggagtgggaagctcatatcgggtcaggcgccaagacggttgtgctggatatcccgctgctgttcgaatccggattgcaatcgtggatggacaaagttctcgtggtgtacgtcgatgatgatgttcagttacgccgccttatggcacgtaacgggtttactgaagaagaagctctgaagcgcattcgttcacagtggcccagtgcggagaaagttaaacgtgcagacgctgtcatcgacaataatggcaatattgaagaaacccgccgccagctgctggacattttacaccagtgggatctgctggacaaaggtggctccggccaccatcatcaccatcactaatga

SEQ ID NO: 4490 - protein, 211 aa, synthetic construct
  REGION 1..211: note = Variant of 3'O-kinase
MAVTIGLTGGIAAGKSTVSAMMRELGLPVIDADEAARAVMKPGEEAYRQIVAEFGPGILRADGEIDRQKLGAIRFSDEQQRKVLNSIVGPAVLKKMLAEWEAHIGSGAKTVVLDIPLLFESGLQSWMDKVLVVYVDDDVQLRRLMARNGFTEEEALKRIRSQWPSAEKVKRADAVIDNNGNIEETRRQLLDILHQWDLLDKGGSGHHHHHH

SEQ ID NO: 4491 - DNA, 639 bp, synthetic construct
  misc_feature 1..639: note = Variant of 3'O-kinase
  source 1..639: mol_type = other DNA
atggcggttaccattggtttaacaggagggatcgcagcgggcaaatcgactgtgagtgccatgatgcgtgaactgggtctgccggtcatcgatgctgacgaggcagcacgcgccgttatgaagccaggcgaagaagcgtatcgcgacattgtatcggaattcgggccgggcatccttcgtgcggatggcgagatcgatcgccagaaactgggtgctatccgcttttcggacgaacaacaacgtaaggtgctgaattcgattgtaggtcctgcagtcctgaagaagatgctcgcggagtgggaagctcatatcgggtcaggcgccaagacggttgtgctggatatcccgctgctgttcgaatccggattgcaatcgtggatggacaaagttctcgtggtgtacgtcgatgatgatgttcagttacgccgccttatggcacgtaacgggtttactgaagaagaagctctgaagcgcattcgttcacagtggcccagtgcggagaaagttaaacgtgcagacgctgtcatcgacaataatggcaatattgaagaaacccgccgccagctgctggacattttacaccagtgggatctgctggacaaaggtggctccggccaccatcatcaccatcactaatga

SEQ ID NO: 4492 - protein, 211 aa, synthetic construct
  REGION 1..211: note = Variant of 3'O-kinase
MAVTIGLTGGIAAGKSTVSAMMRELGLPVIDADEAARAVMKPGEEAYRDIVSEFGPGILRADGEIDRQKLGAIRFSDEQQRKVLNSIVGPAVLKKMLAEWEAHIGSGAKTVVLDIPLLFESGLQSWMDKVLVVYVDDDVQLRRLMARNGFTEEEALKRIRSQWPSAEKVKRADAVIDNNGNIEETRRQLLDILHQWDLLDKGGSGHHHHHH

SEQ ID NO: 4493 - DNA, 639 bp, synthetic construct
  misc_feature 1..639: note = Variant of 3'O-kinase
  source 1..639: mol_type = other DNA
atggcggttaccattggtttaacaggagggatcgcagcgggcaaatcgactgtgagtgccatgatgcgtgaactgggtctgccggtcatcgatgctgacgaggcagcacgcgccgttatgaagccaggcgaagaagcgtatcgcgacattgtagctgaattcgggccgggcatccttcgtgcggatggcgagatcgatcgccagaaactgggtgctatccgcttttcggacgaacaacaacgtaaggtgctgaattcgattgtaggtcctgcagtcctgaagaagatgctcgcggagtgggaagctcatatcgggtcaggcgccaagacggttgtgctggatatcccgctgctgttcgaatccggattgcaagcttggatggacaaagttctcgtggtgtacgtcgatgatgatgttcagttacgccgccttatggcacgtaacgggtttactgaagaagaagctctgaagcgcattcgttcacagtggcccagtgcggagaaagttaaacgtgcagacgctgtcatcgacaataatggcaatattgaagaaacccgccgccagctgctggacattttacaccagtgggatctgctggacaaaggtggctccggccaccatcatcaccatcactaatga

SEQ ID NO: 4494 - protein, 211 aa, synthetic construct
  REGION 1..211: note = Variant of 3'O-kinase
MAVTIGLTGGIAAGKSTVSAMMRELGLPVIDADEAARAVMKPGEEAYRDIVAEFGPGILRADGEIDRQKLGAIRFSDEQQRKVLNSIVGPAVLKKMLAEWEAHIGSGAKTVVLDIPLLFESGLQAWMDKVLVVYVDDDVQLRRLMARNGFTEEEALKRIRSQWPSAEKVKRADAVIDNNGNIEETRRQLLDILHQWDLLDKGGSGHHHHHH

SEQ ID NO: 4495 - DNA, 639 bp, synthetic construct
  misc_feature 1..639: note = Variant of 3'O-kinase
  source 1..639: mol_type = other DNA
atggcggttaccattggtttaacaggagggatcgcagcgggcaaatcgactgtgagtgccatgatgcgtgaactgggtctgccggtcatcgatgctgacgaggcagcacgcgccgttatgaagccaggcgaagaagcgtatcgcatgattgtagctgaattcgggccgggcatccttcgtgcggatggcgagatcgatcgccagaaactgggtgctatccgcttttcggacgaacaacaacgtaaggtgctgaattcgattgtaggtcctgcagtcctgaagaagatgctcgcggagtgggaagctcatatcgggtcaggcgccaagacggttgtgctggatatcccgctgctgttcgaatccggattgcaatcgtggatggacaaagttctcgtggtgtacgtcgatgatgatgttcagttacgccgccttatggcacgtaacgggtttactgaagaagaagctctgaagcgcattcgttcacagtggcccagtgcggagaaagttaaacgtgcagacgctgtcatcgacaataatggcaatattgaagaaacccgccgccagctgctggacattttacaccagtgggatctgctggacaaaggtggctccggccaccatcatcaccatcactaatga

SEQ ID NO: 4496 - protein, 211 aa, synthetic construct
  REGION 1..211: note = Variant of 3'O-kinase
MAVTIGLTGGIAAGKSTVSAMMRELGLPVIDADEAARAVMKPGEEAYRMIVAEFGPGILRADGEIDRQKLGAIRFSDEQQRKVLNSIVGPAVLKKMLAEWEAHIGSGAKTVVLDIPLLFESGLQSWMDKVLVVYVDDDVQLRRLMARNGFTEEEALKRIRSQWPSAEKVKRADAVIDNNGNIEETRRQLLDILHQWDLLDKGGSGHHHHHH

SEQ ID NO: 4497 - DNA, 639 bp, synthetic construct
  misc_feature 1..639: note = Variant of 3'O-kinase
  source 1..639: mol_type = other DNA
atggcggttaccattggtttaacaggagggatcgcagcgggcaaatcgactgtgagtgccatgatgcgtgaactgggtctgccggtcatcgatgctgacgaggcagcacgcgccgttatgaagccaggcgaagaagcgtatcgcgacattgtagctgaattcgggccgggcatccttcgtgcggatggcgagatcgatcgccagaaactgggtgctatccgcttttcggacgaacaacaacgtaaggtgctgaattcgattgtaggtcctgcagtcctgaagaagatgctcgcggagtgggaagctcatatcgggtcaggcgccaagacggttgtgctggatatcccgctgctgttcgaatccggattgcaatcgtggccggacaaagttctcgtggtgtacgtcgatgatgatgttcagttacgccgccttatggcacgtaacgggtttactgaagaagaagctctgaagcgcattcgttcacagtggcccagtgcggagaaagttaaacgtgcagacgctgtcatcgacaataatggcaatattgaagaaacccgccgccagctgctggacattttacaccagtgggatctgctggacaaaggtggctccggccaccatcatcaccatcactaatga

SEQ ID NO: 4498 - protein, 211 aa, synthetic construct
  REGION 1..211: note = Variant of 3'O-kinase
MAVTIGLTGGIAAGKSTVSAMMRELGLPVIDADEAARAVMKPGEEAYRDIVAEFGPGILRADGEIDRQKLGAIRFSDEQQRKVLNSIVGPAVLKKMLAEWEAHIGSGAKTVVLDIPLLFESGLQSWPDKVLVVYVDDDVQLRRLMARNGFTEEEALKRIRSQWPSAEKVKRADAVIDNNGNIEETRRQLLDILHQWDLLDKGGSGHHHHHH

SEQ ID NO: 4499 - DNA, 639 bp, synthetic construct
  misc_feature 1..639: note = Variant of 3'O-kinase
  source 1..639: mol_type = other DNA
atggcggttaccattggtttaacaggagggatcgcagcgggcaaatcgactgtgagtgccatgatgcgtgaactgggtctgccggtcatcgatgctgacgaggcagcacgcgccgttatgaagccaggcgaagaagcgtatcgcgacattgtagctgaattcgggccgggcatccttcgtgcggatggcgagatcgatcgccagaaactgggtgctatccgcttttcggacgaacaacaacgtaaggtgctgaattcgattgtaggtcctgcagtcctgaagaagatgctcgcggagtgggaagctcatatcgggtcaggcgccaagacggttgtgctggatatcccgctgctgttcgaatccggattgcaatcgtggatggacaaagttctcgtggtgtacgtcgatgatgatgttcagttacgccgccttatggcacgtaacgggtttactgaagaagaagctctgaagcgcattcgttcacagtggcccagtgcggagaaagttaaacgtgcagacgctgtcatcgacaataatggcaatattgaagaaacccctcgccagctgctggacattttacaccagtgggatctgctggacaaaggtggctccggccaccatcatcaccatcactaatga

SEQ ID NO: 4500 - protein, 211 aa, synthetic construct
  REGION 1..211: note = Variant of 3'O-kinase
MAVTIGLTGGIAAGKSTVSAMMRELGLPVIDADEAARAVMKPGEEAYRDIVAEFGPGILRADGEIDRQKLGAIRFSDEQQRKVLNSIVGPAVLKKMLAEWEAHIGSGAKTVVLDIPLLFESGLQSWMDKVLVVYVDDDVQLRRLMARNGFTEEEALKRIRSQWPSAEKVKRADAVIDNNGNIEETPRQLLDILHQWDLLDKGGSGHHHHHH

SEQ ID NO: 4501 - DNA, 639 bp, synthetic construct
  misc_feature 1..639: note = Variant of 3'O-kinase
  source 1..639: mol_type = other DNA
atggtggttaccattggtttaacaggagggatcgcagcgggcaaatcgactgtgagtgccatgatgcgtgaactgggtctgccggtcatcgatgctgacgaggcagcacgcgccgttatgaagccaggcgaagaagcgtatcgcgacattgtagctgaattcgggccgggcatccttcgtgcggatggcgagatcgatcgccagaaactgggtgctatccgcttttcggacgaacaacaacgtaaggtgctgaattcgattgtaggtcctgcagtcctgaagaagatgctcgcggagtgggaagctcatatcgggtcaggcgccaagacggttgtgctggatatcccgctgctgttcgaatccggattgcaatcgtggatggacaaagttctcgtggtgtacgtcgatgatgatgttcagttacgccgccttatggcacgtaacgggtttactgaagaagaagctctgaagcgcattcgttcacagtggcccagtgcggagaaagttaaacgtgcagacgctgtcatcgacaataatggcaatattgaagaaacccgccgccagctgctggacattttacaccagtgggatctgctggacaaaggtggctccggccaccatcatcaccatcactaatga

SEQ ID NO: 4502 - protein, 211 aa, synthetic construct
  REGION 1..211: note = Variant of 3'O-kinase
MVVTIGLTGGIAAGKSTVSAMMRELGLPVIDADEAARAVMKPGEEAYRDIVAEFGPGILRADGEIDRQKLGAIRFSDEQQRKVLNSIVGPAVLKKMLAEWEAHIGSGAKTVVLDIPLLFESGLQSWMDKVLVVYVDDDVQLRRLMARNGFTEEEALKRIRSQWPSAEKVKRADAVIDNNGNIEETRRQLLDILHQWDLLDKGGSGHHHHHH

SEQ ID NO: 4503 - DNA, 639 bp, synthetic construct
  misc_feature 1..639: note = Variant of 3'O-kinase
  source 1..639: mol_type = other DNA
atggcggttaccattggtttaacaggagggatcgcagcgggcaaatcgactgtgagtgccatgatgcgtgaactgggtctgccggtcatcgatgctgacgaggcagcacgcgccgttatgaagccaggcgaagaagcgtatcgcgacattgtagctgaattcgggccgggcatccttcgtgcggatggcgagatcgatcgccagaaactgggtgctatccgcttttcggacgaacaacaacgtaaggtgctgaattcgattgtaggtcctgcagtcctgaagaagatgctcgcggagtggctggctcatatcgggtcaggcgccaagacggttgtgctggatatcccgctgctgttcgaatccggattgcaatcgtggatggacaaagttctcgtggtgtacgtcgatgatgatgttcagttacgccgccttatggcacgtaacgggtttactgaagaagaagctctgaagcgcattcgttcacagtggcccagtgcggagaaagttaaacgtgcagacgctgtcatcgacaataatggcaatattgaagaaacccgccgccagctgctggacattttacaccagtgggatctgctggacaaaggtggctccggccaccatcatcaccatcactaatga

SEQ ID NO: 4504 - protein, 211 aa, synthetic construct
  REGION 1..211: note = Variant of 3'O-kinase
MAVTIGLTGGIAAGKSTVSAMMRELGLPVIDADEAARAVMKPGEEAYRDIVAEFGPGILRADGEIDRQKLGAIRFSDEQQRKVLNSIVGPAVLKKMLAEWLAHIGSGAKTVVLDIPLLFESGLQSWMDKVLVVYVDDDVQLRRLMARNGFTEEEALKRIRSQWPSAEKVKRADAVIDNNGNIEETRRQLLDILHQWDLLDKGGSGHHHHHH

SEQ ID NO: 4505 - DNA, 639 bp, synthetic construct
  misc_feature 1..639: note = Variant of 3'O-kinase
  source 1..639: mol_type = other DNA
atggcggttaccattggtttaacaggagggatcgcagcgggcaaatcgactgtgagtgccatgatgcgtgaactgggtctgccggtcatcgatgctgacgaggcagcacgcgccgttatgaagccaggcgaagaagcgtatcgcgacattgtagctgaattcgggccgggcatccttcgtgcggatggcgagatcgatcgccagaaactgggtgctatccgctttgatgacgaacaacaacgtaaggtgctgaattcgattgtaggtcctgcagtcctgaagaagatgctcgcggagtgggaagctcatatcgggtcaggcgccaagacggttgtgctggatatcccgctgctgttcgaatccggattgcaatcgtggatggacaaagttctcgtggtgtacgtcgatgatgatgttcagttacgccgccttatggcacgtaacgggtttactgaagaagaagctctgaagcgcattcgttcacagtggcccagtgcggagaaagttaaacgtgcagacgctgtcatcgacaataatggcaatattgaagaaacccgccgccagctgctggacattttacaccagtgggatctgctggacaaaggtggctccggccaccatcatcaccatcactaatga

SEQ ID NO: 4506 - protein, 211 aa, synthetic construct
  REGION 1..211: note = Variant of 3'O-kinase
MAVTIGLTGGIAAGKSTVSAMMRELGLPVIDADEAARAVMKPGEEAYRDIVAEFGPGILRADGEIDRQKLGAIRFDDEQQRKVLNSIVGPAVLKKMLAEWEAHIGSGAKTVVLDIPLLFESGLQSWMDKVLVVYVDDDVQLRRLMARNGFTEEEALKRIRSQWPSAEKVKRADAVIDNNGNIEETRRQLLDILHQWDLLDKGGSGHHHHHH

SEQ ID NO: 4507 - DNA, 639 bp, synthetic construct
  misc_feature 1..639: note = Variant of 3'O-kinase
  source 1..639: mol_type = other DNA
atggcggttaccattggtttaacaggagggatcgcagcgggcaaatcgactgtgagtgccatgatgcgtgaactgggtctgccggtcatcgatgctgacgaggcagcacgcgccgttatgaagccaggcgaagaagcgtatcgcgacattgtagctgaattcgggccgggcatccttcgtgcggatggcgagatcgatcgccagaaactgggtgctatccgcttttcggacgaacaacaacgtgatgtgctgaattcgattgtaggtcctgcagtcctgaagaagatgctcgcggagtgggaagctcatatcgggtcaggcgccaagacggttgtgctggatatcccgctgctgttcgaatccggattgcaatcgtggatggacaaagttctcgtggtgtacgtcgatgatgatgttcagttacgccgccttatggcacgtaacgggtttactgaagaagaagctctgaagcgcattcgttcacagtggcccagtgcggagaaagttaaacgtgcagacgctgtcatcgacaataatggcaatattgaagaaacccgccgccagctgctggacattttacaccagtgggatctgctggacaaaggtggctccggccaccatcatcaccatcactaatga

SEQ ID NO: 4508 - protein, 211 aa, synthetic construct
  REGION 1..211: note = Variant of 3'O-kinase
MAVTIGLTGGIAAGKSTVSAMMRELGLPVIDADEAARAVMKPGEEAYRDIVAEFGPGILRADGEIDRQKLGAIRFSDEQQRDVLNSIVGPAVLKKMLAEWEAHIGSGAKTVVLDIPLLFESGLQSWMDKVLVVYVDDDVQLRRLMARNGFTEEEALKRIRSQWPSAEKVKRADAVIDNNGNIEETRRQLLDILHQWDLLDKGGSGHHHHHH

SEQ ID NO: 4509 - DNA, 639 bp, synthetic construct
  misc_feature 1..639: note = Variant of 3'O-kinase
  source 1..639: mol_type = other DNA
atggcggttaccattggtttaacaggagggatcgcagcgggcaaatcgactgtgagtgccatgatgcgtgaactgggtctgccggtcatcgatgctgacgaggcagcacgcgccgttatgaagccaggcgaagaagcgtatcgcgacattgtagctgaattcgggccgggcatccttcgtgcggatggcgagatcgatcgccagaaactgggtgctatccgcttttcggacgaacaacaacgtaaggtgctgaattcgattgtaggtcctgcagtcctgcagaagatgctcgcggagtgggaagctcatatcgggtcaggcgccaagacggttgtgctggatatcccgctgctgttcgaatccggattgcaatcgtggatggacaaagttctcgtggtgtacgtcgatgatgatgttcagttacgccgccttatggcacgtaacgggtttactgaagaagaagctctgaagcgcattcgttcacagtggcccagtgcggagaaagttaaacgtgcagacgctgtcatcgacaataatggcaatattgaagaaacccgccgccagctgctggacattttacaccagtgggatctgctggacaaaggtggctccggccaccatcatcaccatcactaatga

SEQ ID NO: 4510 - protein, 211 aa, synthetic construct
  REGION 1..211: note = Variant of 3'O-kinase
MAVTIGLTGGIAAGKSTVSAMMRELGLPVIDADEAARAVMKPGEEAYRDIVAEFGPGILRADGEIDRQKLGAIRFSDEQQRKVLNSIVGPAVLQKMLAEWEAHIGSGAKTVVLDIPLLFESGLQSWMDKVLVVYVDDDVQLRRLMARNGFTEEEALKRIRSQWPSAEKVKRADAVIDNNGNIEETRRQLLDILHQWDLLDKGGSGHHHHHH

SEQ ID NO: 4511 - DNA, 639 bp, synthetic construct
  misc_feature 1..639: note = Variant of 3'O-kinase
  source 1..639: mol_type = other DNA
atggcggttaccattggtttaacaggagggatcgcagcgggcaaatcgactgtgagtgccatgatgcgtgaactgggtctgccggtcatcgatgctgacgaggcagcacgcgccgttatgaagccaggcgaagaagcgtatcgcgacattgtagctgaattcgggccgggcatccttcgtgcggatggcgagatcgatcgccagaaactgggtgctatccgcttttcggacgaacaacaacgtaaggtgctgaattcgattgtaggtcctgcagtcctgaagaagatgctcgcggagtgggaagctcatatcgggtcaggcgccaagacggttgtgctggatatcccgctgctgttcgaatccggattgcaatcgtggatggacaaagttctcgtggtgtacgtcgatgatgatgttcagttacgccgccttatggcacgtaacgggtttactgaagaagaagctctgaagcgcattcgttcacagtggcccagtgcggagaaagttaaacgtgcagacgctgtcatcgacaataatggcaatattgaagaaaccgttcgccagctgctggacattttacaccagtgggatctgctggacaaaggtggctccggccaccatcatcaccatcactaatga

SEQ ID NO: 4512 - protein, 211 aa, synthetic construct
  REGION 1..211: note = Variant of 3'O-kinase
MAVTIGLTGGIAAGKSTVSAMMRELGLPVIDADEAARAVMKPGEEAYRDIVAEFGPGILRADGEIDRQKLGAIRFSDEQQRKVLNSIVGPAVLKKMLAEWEAHIGSGAKTVVLDIPLLFESGLQSWMDKVLVVYVDDDVQLRRLMARNGFTEEEALKRIRSQWPSAEKVKRADAVIDNNGNIEETVRQLLDILHQWDLLDKGGSGHHHHHH

SEQ ID NO: 4513 - DNA, 639 bp, synthetic construct
  misc_feature 1..639: note = Variant of 3'O-kinase
  source 1..639: mol_type = other DNA
atggcggttaccattggtttaacaggagggatcgcagcgggcaaatcgactgtgagtgccatgatgcgtgaactgggtctgccggtcatcgatgctgacgaggcagcacgcgccgttatgaagccaggcgaagaagcgtatcgcgacattgtagctgaattcgggccgggcatccttcgtgcggatggcgagatcgatcgccagaaactgggtgctatccgcttttcggacgaacaacaacgtaaggtgctgaattcgattgtaggtcctgcagtcctgaataagatgctcgcggagtgggaagctcatatcgggtcaggcgccaagacggttgtgctggatatcccgctgctgttcgaatccggattgcaatcgtggatggacaaagttctcgtggtgtacgtcgatgatgatgttcagttacgccgccttatggcacgtaacgggtttactgaagaagaagctctgaagcgcattcgttcacagtggcccagtgcggagaaagttaaacgtgcagacgctgtcatcgacaataatggcaatattgaagaaacccgccgccagctgctggacattttacaccagtgggatctgctggacaaaggtggctccggccaccatcatcaccatcactaatga

SEQ ID NO: 4514 - protein, 211 aa, synthetic construct
  REGION 1..211: note = Variant of 3'O-kinase
MAVTIGLTGGIAAGKSTVSAMMRELGLPVIDADEAARAVMKPGEEAYRDIVAEFGPGILRADGEIDRQKLGAIRFSDEQQRKVLNSIVGPAVLNKMLAEWEAHIGSGAKTVVLDIPLLFESGLQSWMDKVLVVYVDDDVQLRRLMARNGFTEEEALKRIRSQWPSAEKVKRADAVIDNNGNIEETRRQLLDILHQWDLLDKGGSGHHHHHH

SEQ ID NO: 4515 - DNA, 639 bp, synthetic construct
  misc_feature 1..639: note = Variant of 3'O-kinase
  source 1..639: mol_type = other DNA
atggcggttccgattggtttaacaggagggatcgcagcgggcaaatcgactgtgagtgccatgatgcgtgaactgggtctgccggtcatcgatgctgacgaggcagcacgcgccgttatgaagccaggcgaagaagcgtatcgcgacattgtagctgaattcgggccgggcatccttcgtgcggatggcgagatcgatcgccagaaactgggtgctatccgcttttcggacgaacaacaacgtaaggtgctgaattcgattgtaggtcctgcagtcctgaagaagatgctcgcggagtgggaagctcatatcgggtcaggcgccaagacggttgtgctggatatcccgctgctgttcgaatccggattgcaatcgtggatggacaaagttctcgtggtgtacgtcgatgatgatgttcagttacgccgccttatggcacgtaacgggtttactgaagaagaagctctgaagcgcattcgttcacagtggcccagtgcggagaaagttaaacgtgcagacgctgtcatcgacaataatggcaatattgaagaaacccgccgccagctgctggacattttacaccagtgggatctgctggacaaaggtggctccggccaccatcatcaccatcactaatga

SEQ ID NO: 4516 - protein, 211 aa, synthetic construct
  REGION 1..211: note = Variant of 3'O-kinase
MAVPIGLTGGIAAGKSTVSAMMRELGLPVIDADEAARAVMKPGEEAYRDIVAEFGPGILRADGEIDRQKLGAIRFSDEQQRKVLNSIVGPAVLKKMLAEWEAHIGSGAKTVVLDIPLLFESGLQSWMDKVLVVYVDDDVQLRRLMARNGFTEEEALKRIRSQWPSAEKVKRADAVIDNNGNIEETRRQLLDILHQWDLLDKGGSGHHHHHH

SEQ ID NO: 4517 - DNA, 639 bp, synthetic construct
  misc_feature 1..639: note = Variant of 3'O-kinase
  source 1..639: mol_type = other DNA
atgtgggttaccattggtttaacaggagggatcgcagcgggcaaatcgactgtgagtgccatgatgcgtgaactgggtctgccggtcatcgatgctgacgaggcagcacgcgccgttatgaagccaggcgaagaagcgtatcgcgacattgtagctgaattcgggccgggcatccttcgtgcggatggcgagatcgatcgccagaaactgggtgctatccgcttttcggacgaacaacaacgtaaggtgctgaattcgattgtaggtcctgcagtcctgaagaagatgctcgcggagtgggaagctcatatcgggtcaggcgccaagacggttgtgctggatatcccgctgctgttcgaatccggattgcaatcgtggatggacaaagttctcgtggtgtacgtcgatgatgatgttcagttacgccgccttatggcacgtaacgggtttactgaagaagaagctctgaagcgcattcgttcacagtggcccagtgcggagaaagttaaacgtgcagacgctgtcatcgacaataatggcaatattgaagaaacccgccgccagctgctggacattttacaccagtgggatctgctggacaaaggtggctccggccaccatcatcaccatcactaatga

SEQ ID NO: 4518 - protein, 211 aa, synthetic construct
  REGION 1..211: note = Variant of 3'O-kinase
MWVTIGLTGGIAAGKSTVSAMMRELGLPVIDADEAARAVMKPGEEAYRDIVAEFGPGILRADGEIDRQKLGAIRFSDEQQRKVLNSIVGPAVLKKMLAEWEAHIGSGAKTVVLDIPLLFESGLQSWMDKVLVVYVDDDVQLRRLMARNGFTEEEALKRIRSQWPSAEKVKRADAVIDNNGNIEETRRQLLDILHQWDLLDKGGSGHHHHHH

SEQ ID NO: 4519 - DNA, 639 bp, synthetic construct
  misc_feature 1..639: note = Variant of 3'O-kinase
  source 1..639: mol_type = other DNA
atggcggttaccattggtttaacaggagggatcgcagcgggcaaatcgactgtgagtgccatgatgcgtgaactgggtctgccggtcatcgatgctgacgagtatgcacgcgccgttatgaagccaggcgaagaagcgtatcgcgacattgtagctgaattcgggccgggcatccttcgtgcggatggcgagatcgatcgccagaaactgggtgctatccgcttttcggacgaacaacaacgtaaggtgctgaattcgattgtaggtcctgcagtcctgaagaagatgctcgcggagtgggaagctcatatcgggtcaggcgccaagacggttgtgctggatatcccgctgctgttcgaatccggattgcaatcgtggatggacaaagttctcgtggtgtacgtcgatgatgatgttcagttacgccgccttatggcacgtaacgggtttactgaagaagaagctctgaagcgcattcgttcacagtggcccagtgcggagaaagttaaacgtgcagacgctgtcatcgacaataatggcaatattgaagaaacccgccgccagctgctggacattttacaccagtgggatctgctggacaaaggtggctccggccaccatcatcaccatcactaatga

SEQ ID NO: 4520 - protein, 211 aa, synthetic construct
  REGION 1..211: note = Variant of 3'O-kinase
MAVTIGLTGGIAAGKSTVSAMMRELGLPVIDADEYARAVMKPGEEAYRDIVAEFGPGILRADGEIDRQKLGAIRFSDEQQRKVLNSIVGPAVLKKMLAEWEAHIGSGAKTVVLDIPLLFESGLQSWMDKVLVVYVDDDVQLRRLMARNGFTEEEALKRIRSQWPSAEKVKRADAVIDNNGNIEETRRQLLDILHQWDLLDKGGSGHHHHHH

SEQ ID NO: 4521 - DNA, 639 bp, synthetic construct
  misc_feature 1..639: note = Variant of 3'O-kinase
  source 1..639: mol_type = other DNA
atggcggttaccattggtttaacaggagggatcgcagcgggcaaatcgactgtgagtgccatgatgcgtgaactgggtctgccggtcatcgatgctgacgaggcagcacgcgccgttatgaagccaggcgaagaagcgtatcgcgacattgtagctgaattcgggccgggcatccttcgtgcggatggcgagatcgatcgccagaaactgggtgctatccgcttttcggacgaacaacaacgtaaggtgctgaattcgattgtaggtcctgcagtcctggctaagatgctcgcggagtgggaagctcatatcgggtcaggcgccaagacggttgtgctggatatcccgctgctgttcgaatccggattgcaatcgtggatggacaaagttctcgtggtgtacgtcgatgatgatgttcagttacgccgccttatggcacgtaacgggtttactgaagaagaagctctgaagcgcattcgttcacagtggcccagtgcggagaaagttaaacgtgcagacgctgtcatcgacaataatggcaatattgaagaaacccgccgccagctgctggacattttacaccagtgggatctgctggacaaaggtggctccggccaccatcatcaccatcactaatga

SEQ ID NO: 4522 - protein, 211 aa, synthetic construct
  REGION 1..211: note = Variant of 3'O-kinase
MAVTIGLTGGIAAGKSTVSAMMRELGLPVIDADEAARAVMKPGEEAYRDIVAEFGPGILRADGEIDRQKLGAIRFSDEQQRKVLNSIVGPAVLAKMLAEWEAHIGSGAKTVVLDIPLLFESGLQSWMDKVLVVYVDDDVQLRRLMARNGFTEEEALKRIRSQWPSAEKVKRADAVIDNNGNIEETRRQLLDILHQWDLLDKGGSGHHHHHH

SEQ ID NO: 4523 - DNA, 639 bp, synthetic construct
  misc_feature 1..639: note = Variant of 3'O-kinase
  source 1..639: mol_type = other DNA
atggcggttaccattggtttaacaggagggatcgcagcgggcaaatcgactgtgagtgccatgatgcgtgaactgggtctgccggtcatcgatgctgacgaggcagcacgcgccgttatgaagccaggcgaagaagcgtatcgcgacattgtagctgaattcgggccgggcatccttcgtgcggatggcgagatcgatcgccagaaactgggtgctatccgcttttcggacgaacaacaacgtaaggtgctgaattcgattgtaggtcctgcagtcctgactaagatgctcgcggagtgggaagctcatatcgggtcaggcgccaagacggttgtgctggatatcccgctgctgttcgaatccggattgcaatcgtggatggacaaagttctcgtggtgtacgtcgatgatgatgttcagttacgccgccttatggcacgtaacgggtttactgaagaagaagctctgaagcgcattcgttcacagtggcccagtgcggagaaagttaaacgtgcagacgctgtcatcgacaataatggcaatattgaagaaacccgccgccagctgctggacattttacaccagtgggatctgctggacaaaggtggctccggccaccatcatcaccatcactaatga

SEQ ID NO: 4524 - protein, 211 aa, synthetic construct
  REGION 1..211: note = Variant of 3'O-kinase
MAVTIGLTGGIAAGKSTVSAMMRELGLPVIDADEAARAVMKPGEEAYRDIVAEFGPGILRADGEIDRQKLGAIRFSDEQQRKVLNSIVGPAVLTKMLAEWEAHIGSGAKTVVLDIPLLFESGLQSWMDKVLVVYVDDDVQLRRLMARNGFTEEEALKRIRSQWPSAEKVKRADAVIDNNGNIEETRRQLLDILHQWDLLDKGGSGHHHHHH

SEQ ID NO: 4525 - DNA, 639 bp, synthetic construct
  misc_feature 1..639: note = Variant of 3'O-kinase
  source 1..639: mol_type = other DNA
atgcgggttaccattggtttaacaggagggatcgcagcgggcaaatcgactgtgagtgccatgatgcgtgaactgggtctgccggtcatcgatgctgacgaggcagcacgcgccgttatgaagccaggcgaagaagcgtatcgcgacattgtagctgaattcgggccgggcatccttcgtgcggatggcgagatcgatcgccagaaactgggtgctatccgcttttcggacgaacaacaacgtaaggtgctgaattcgattgtaggtcctgcagtcctgaagaagatgctcgcggagtgggaagctcatatcgggtcaggcgccaagacggttgtgctggatatcccgctgctgttcgaatccggattgcaatcgtggatggacaaagttctcgtggtgtacgtcgatgatgatgttcagttacgccgccttatggcacgtaacgggtttactgaagaagaagctctgaagcgcattcgttcacagtggcccagtgcggagaaagttaaacgtgcagacgctgtcatcgacaataatggcaatattgaagaaacccgccgccagctgctggacattttacaccagtgggatctgctggacaaaggtggctccggccaccatcatcaccatcactaatga

SEQ ID NO: 4526 - protein, 211 aa, synthetic construct
  REGION 1..211: note = Variant of 3'O-kinase
MRVTIGLTGGIAAGKSTVSAMMRELGLPVIDADEAARAVMKPGEEAYRDIVAEFGPGILRADGEIDRQKLGAIRFSDEQQRKVLNSIVGPAVLKKMLAEWEAHIGSGAKTVVLDIPLLFESGLQSWMDKVLVVYVDDDVQLRRLMARNGFTEEEALKRIRSQWPSAEKVKRADAVIDNNGNIEETRRQLLDILHQWDLLDKGGSGHHHHHH

SEQ ID NO: 4527 - DNA, 639 bp, synthetic construct
  misc_feature 1..639: note = Variant of 3'O-kinase
  source 1..639: mol_type = other DNA
atggcggttaccattggtttaacaggagggatcgcagcgggcaaatcgactgtgagtgccatgatgcgtgaactgggtctgccggtcatcgatgctgacgaggcagcacgcgccgttatgaagccaggcgaagaagcgtatcgcgacattgtagctgaattcgggccgggcatccttcgtgcggatggcgagatcgatcgccagaaactgggtgctatccgcttttcggacgaacaacaacgtaaggtgctgaattcgattgtaggtcctgcagtcctgaagaagatgctcgcggagtgggaagctcatatcgggtcaggcgccaagacggttgtgctggatatcccgctgctgttcgaatccggattgcaatcgtgggcggacaaagttctcgtggtgtacgtcgatgatgatgttcagttacgccgccttatggcacgtaacgggtttactgaagaagaagctctgaagcgcattcgttcacagtggcccagtgcggagaaagttaaacgtgcagacgctgtcatcgacaataatggcaatattgaagaaacccgccgccagctgctggacattttacaccagtgggatctgctggacaaaggtggctccggccaccatcatcaccatcactaatga

SEQ ID NO: 4528 - protein, 211 aa, synthetic construct
  REGION 1..211: note = Variant of 3'O-kinase
MAVTIGLTGGIAAGKSTVSAMMRELGLPVIDADEAARAVMKPGEEAYRDIVAEFGPGILRADGEIDRQKLGAIRFSDEQQRKVLNSIVGPAVLKKMLAEWEAHIGSGAKTVVLDIPLLFESGLQSWADKVLVVYVDDDVQLRRLMARNGFTEEEALKRIRSQWPSAEKVKRADAVIDNNGNIEETRRQLLDILHQWDLLDKGGSGHHHHHH

SEQ ID NO: 4529 - DNA, 639 bp, synthetic construct
  misc_feature 1..639: note = Variant of 3'O-kinase
  source 1..639: mol_type = other DNA
atggcggttaccattggtttaacaggagggatcgcagcgggcaaatcgactgtgagtgccatgatgcgtgaactgggtctgccggtcatcgatgctgacgaggcagcacgcgccgttatgaagccaggcgaagaagcgtatcgcgacattgtagctgaattcgggccgggcatccttcgtgcggatggcgagatcgatcgccagaaactgggtgctatccgcttttcggacgaacaacaacgtaaggtgctgaattcgattgtaggtcctgcagtcctgaagaagatgtgggcggagtgggaagctcatatcgggtcaggcgccaagacggttgtgctggatatcccgctgctgttcgaatccggattgcaatcgtggatggacaaagttctcgtggtgtacgtcgatgatgatgttcagttacgccgccttatggcacgtaacgggtttactgaagaagaagctctgaagcgcattcgttcacagtggcccagtgcggagaaagttaaacgtgcagacgctgtcatcgacaataatggcaatattgaagaaacccgccgccagctgctggacattttacaccagtgggatctgctggacaaaggtggctccggccaccatcatcaccatcactaatga

SEQ ID NO: 4530 - protein, 211 aa, synthetic construct
  REGION 1..211: note = Variant of 3'O-kinase
MAVTIGLTGGIAAGKSTVSAMMRELGLPVIDADEAARAVMKPGEEAYRDIVAEFGPGILRADGEIDRQKLGAIRFSDEQQRKVLNSIVGPAVLKKMWAEWEAHIGSGAKTVVLDIPLLFESGLQSWMDKVLVVYVDDDVQLRRLMARNGFTEEEALKRIRSQWPSAEKVKRADAVIDNNGNIEETRRQLLDILHQWDLLDKGGSGHHHHHH

SEQ ID NO: 4531 - DNA, 639 bp, synthetic construct
  misc_feature 1..639: note = Variant of 3'O-kinase
  source 1..639: mol_type = other DNA
atggcggttaccattggtttaacaggagggatcgcagcgggcaaatcgactgtgagtgccatgatgcgtgaactgggtctgccggtcatcgatgctgacgaggcagcacgcgccgttatgaagccaggcgaagaagcgtatcgcgacattgtagctgaattcgggccgggcatccttcgtgcggatggcgagatcgatcgccagaaactgggtgctatccgctttggggacgaacaacaacgtaaggtgctgaattcgattgtaggtcctgcagtcctgaagaagatgctcgcggagtgggaagctcatatcgggtcaggcgccaagacggttgtgctggatatcccgctgctgttcgaatccggattgcaatcgtggatggacaaagttctcgtggtgtacgtcgatgatgatgttcagttacgccgccttatggcacgtaacgggtttactgaagaagaagctctgaagcgcattcgttcacagtggcccagtgcggagaaagttaaacgtgcagacgctgtcatcgacaataatggcaatattgaagaaacccgccgccagctgctggacattttacaccagtgggatctgctggacaaaggtggctccggccaccatcatcaccatcactaatga

SEQ ID NO: 4532 - protein, 211 aa, synthetic construct
  REGION 1..211: note = Variant of 3'O-kinase
MAVTIGLTGGIAAGKSTVSAMMRELGLPVIDADEAARAVMKPGEEAYRDIVAEFGPGILRADGEIDRQKLGAIRFGDEQQRKVLNSIVGPAVLKKMLAEWEAHIGSGAKTVVLDIPLLFESGLQSWMDKVLVVYVDDDVQLRRLMARNGFTEEEALKRIRSQWPSAEKVKRADAVIDNNGNIEETRRQLLDILHQWDLLDKGGSGHHHHHH

SEQ ID NO: 4533 - DNA, 639 bp, synthetic construct
  misc_feature 1..639: note = Variant of 3'O-kinase
  source 1..639: mol_type = other DNA
atggcggttaccattggtttaacaggagggatcgcagcgggcaaatcgactgtgagtgccatgatgcgtgaactgggtctgccggtcatcgatgctgacgaggcagcacgcgccgttatgaagccaggcgaagaagcgtatcgcggtattgtagctgaattcgggccgggcatccttcgtgcggatggcgagatcgatcgccagaaactgggtgctatccgcttttcggacgaacaacaacgtaaggtgctgaattcgattgtaggtcctgcagtcctgaagaagatgctcgcggagtgggaagctcatatcgggtcaggcgccaagacggttgtgctggatatcccgctgctgttcgaatccggattgcaatcgtggatggacaaagttctcgtggtgtacgtcgatgatgatgttcagttacgccgccttatggcacgtaacgggtttactgaagaagaagctctgaagcgcattcgttcacagtggcccagtgcggagaaagttaaacgtgcagacgctgtcatcgacaataatggcaatattgaagaaacccgccgccagctgctggacattttacaccagtgggatctgctggacaaaggtggctccggccaccatcatcaccatcactaatga

SEQ ID NO: 4534 - protein, 211 aa, synthetic construct
  REGION 1..211: note = Variant of 3'O-kinase
MAVTIGLTGGIAAGKSTVSAMMRELGLPVIDADEAARAVMKPGEEAYRGIVAEFGPGILRADGEIDRQKLGAIRFSDEQQRKVLNSIVGPAVLKKMLAEWEAHIGSGAKTVVLDIPLLFESGLQSWMDKVLVVYVDDDVQLRRLMARNGFTEEEALKRIRSQWPSAEKVKRADAVIDNNGNIEETRRQLLDILHQWDLLDKGGSGHHHHHH

SEQ ID NO: 4535 - DNA, 639 bp, synthetic construct
  misc_feature 1..639: note = Variant of 3'O-kinase
  source 1..639: mol_type = other DNA
atggcggttaccattggtttaacaggagggatcgcagcgggcaaatcgactgtgagtgccatgatgcgtgaactgggtctgccggtcatcgatgctgacgaggcagcacgcgccgttatgaagccaggcgaagaagcgtatcgcaatattgtagctgaattcgggccgggcatccttcgtgcggatggcgagatcgatcgccagaaactgggtgctatccgcttttcggacgaacaacaacgtaaggtgctgaattcgattgtaggtcctgcagtcctgaagaagatgctcgcggagtgggaagctcatatcgggtcaggcgccaagacggttgtgctggatatcccgctgctgttcgaatccggattgcaatcgtggatggacaaagttctcgtggtgtacgtcgatgatgatgttcagttacgccgccttatggcacgtaacgggtttactgaagaagaagctctgaagcgcattcgttcacagtggcccagtgcggagaaagttaaacgtgcagacgctgtcatcgacaataatggcaatattgaagaaacccgccgccagctgctggacattttacaccagtgggatctgctggacaaaggtggctccggccaccatcatcaccatcactaatga

SEQ ID NO: 4536 - protein, 211 aa, synthetic construct
  REGION 1..211: note = Variant of 3'O-kinase
MAVTIGLTGGIAAGKSTVSAMMRELGLPVIDADEAARAVMKPGEEAYRNIVAEFGPGILRADGEIDRQKLGAIRFSDEQQRKVLNSIVGPAVLKKMLAEWEAHIGSGAKTVVLDIPLLFESGLQSWMDKVLVVYVDDDVQLRRLMARNGFTEEEALKRIRSQWPSAEKVKRADAVIDNNGNIEETRRQLLDILHQWDLLDKGGSGHHHHHH

SEQ ID NO: 4537 - DNA, 639 bp, synthetic construct
  misc_feature 1..639: note = Variant of 3'O-kinase
  source 1..639: mol_type = other DNA
atggcggttaccattggtttaacaggagggatcgcaatgggcaaatcgactgtgagtgccatgatgcgtgaactgggtctgccggtcatcgatgctgacgaggcagcacgcgccgttatgaagccaggcgaagaagcgtatcgcgacattgtagctgaattcgggccgggcatccttcgtgcggatggcgagatcgatcgccagaaactgggtgctatccgcttttcggacgaacaacaacgtaaggtgctgaattcgattgtaggtcctgcagtcctgaagaagatgctcgcggagtgggaagctcatatcgggtcaggcgccaagacggttgtgctggatatcccgctgctgttcgaatccggattgcaatcgtggatggacaaagttctcgtggtgtacgtcgatgatgatgttcagttacgccgccttatggcacgtaacgggtttactgaagaagaagctctgaagcgcattcgttcacagtggcccagtgcggagaaagttaaacgtgcagacgctgtcatcgacaataatggcaatattgaagaaacccgccgccagctgctggacattttacaccagtgggatctgctggacaaaggtggctccggccaccatcatcaccatcactaatga

SEQ ID NO: 4538 - protein, 211 aa, synthetic construct
  REGION 1..211: note = Variant of 3'O-kinase
MAVTIGLTGGIAMGKSTVSAMMRELGLPVIDADEAARAVMKPGEEAYRDIVAEFGPGILRADGEIDRQKLGAIRFSDEQQRKVLNSIVGPAVLKKMLAEWEAHIGSGAKTVVLDIPLLFESGLQSWMDKVLVVYVDDDVQLRRLMARNGFTEEEALKRIRSQWPSAEKVKRADAVIDNNGNIEETRRQLLDILHQWDLLDKGGSGHHHHHH

SEQ ID NO: 4539 - DNA, 639 bp, synthetic construct
  misc_feature 1..639: note = Variant of 3'O-kinase
  source 1..639: mol_type = other DNA
atggcggttaccattggtttaacaggagggatcgcagcgggcaaatcgactgtgagtgccatgatgcgtgaactgggtctgccggtcatcgatgctgacgaggcagcacgcgccgttatgaagccaggcgaagaagcgtatcgcgacattgtagctgaattcgggccgttgatccttcgtgcggatggcgagatcgatcgccagaaactgggtgctatccgcttttcggacgaacaacaacgtaaggtgctgaattcgattgtaggtcctgcagtcctgaagaagatgctcgcggagtgggaagctcatatcgggtcaggcgccaagacggttgtgctggatatcccgctgctgttcgaatccggattgcaatcgtggatggacaaagttctcgtggtgtacgtcgatgatgatgttcagttacgccgccttatggcacgtaacgggtttactgaagaagaagctctgaagcgcattcgttcacagtggcccagtgcggagaaagttaaacgtgcagacgctgtcatcgacaataatggcaatattgaagaaacccgccgccagctgctggacattttacaccagtgggatctgctggacaaaggtggctccggccaccatcatcaccatcactaatga

SEQ ID NO: 4540 - protein, 211 aa, synthetic construct
  REGION 1..211: note = Variant of 3'O-kinase
MAVTIGLTGGIAAGKSTVSAMMRELGLPVIDADEAARAVMKPGEEAYRDIVAEFGPLILRADGEIDRQKLGAIRFSDEQQRKVLNSIVGPAVLKKMLAEWEAHIGSGAKTVVLDIPLLFESGLQSWMDKVLVVYVDDDVQLRRLMARNGFTEEEALKRIRSQWPSAEKVKRADAVIDNNGNIEETRRQLLDILHQWDLLDKGGSGHHHHHH

SEQ ID NO: 4541 - DNA, 639 bp, synthetic construct
  misc_feature 1..639: note = Variant of 3'O-kinase
  source 1..639: mol_type = other DNA
atggcggttaccattggtttaacaggagggatcgcagcgggcaaatcgactgtgagtgccatgatgcgtgaactgggtctgccggtcatcgatgctgacgagttggcacgcgccgttatgaagccaggcgaagaagcgtatcgcgacattgtagctgaattcgggccgggcatccttcgtgcggatggcgagatcgatcgccagaaactgggtgctatccgcttttcggacgaacaacaacgtaaggtgctgaattcgattgtaggtcctgcagtcctgaagaagatgctcgcggagtgggaagctcatatcgggtcaggcgccaagacggttgtgctggatatcccgctgctgttcgaatccggattgcaatcgtggatggacaaagttctcgtggtgtacgtcgatgatgatgttcagttacgccgccttatggcacgtaacgggtttactgaagaagaagctctgaagcgcattcgttcacagtggcccagtgcggagaaagttaaacgtgcagacgctgtcatcgacaataatggcaatattgaagaaacccgccgccagctgctggacattttacaccagtgggatctgctggacaaaggtggctccggccaccatcatcaccatcactaatga

SEQ ID NO: 4542 - protein, 211 aa, synthetic construct
  REGION 1..211: note = Variant of 3'O-kinase
MAVTIGLTGGIAAGKSTVSAMMRELGLPVIDADELARAVMKPGEEAYRDIVAEFGPGILRADGEIDRQKLGAIRFSDEQQRKVLNSIVGPAVLKKMLAEWEAHIGSGAKTVVLDIPLLFESGLQSWMDKVLVVYVDDDVQLRRLMARNGFTEEEALKRIRSQWPSAEKVKRADAVIDNNGNIEETRRQLLDILHQWDLLDKGGSGHHHHHH

SEQ ID NO: 4543 - DNA, 639 bp, synthetic construct
  misc_feature 1..639: note = Variant of 3'O-kinase
  source 1..639: mol_type = other DNA
atggcggttaccattggtttaacaggagggatcgcagcgggcaaatcgactgtgagtgccatgatgcgtgaactgggtctgccggtcatcgatgctgacgaggcagcacgcgccgttatgaagccaggcgaagaagcgtatcgcgacattgtagctgaattcgggccgggcatccttcgtgcggatggcgagatcgatcgccagaaactgggtgctatccgcttttcggacgaacaacaacgtaaggtgctgaattcgattgtaggtcctgcagtcctgaagaagatgctcgcggagtgggaagctcatatcgggtcaggcgccaagacggttgtgctggatatcccgctgctgttcgaatccggattgcaatcgtggatggacaaagttctcgtggtgtacgtcgatgatgatgttcagttacgccgccttatggcacgtaacgggtttactgaagaagaagctctgaagcgcattcgttcacagtggcccagtgcggcgaaagttaaacgtgcagacgctgtcatcgacaataatggcaatattgaagaaacccgccgccagctgctggacattttacaccagtgggatctgctggacaaaggtggctccggccaccatcatcaccatcactaatga

SEQ ID NO: 4544 - protein, 211 aa, synthetic construct
  REGION 1..211: note = Variant of 3'O-kinase
MAVTIGLTGGIAAGKSTVSAMMRELGLPVIDADEAARAVMKPGEEAYRDIVAEFGPGILRADGEIDRQKLGAIRFSDEQQRKVLNSIVGPAVLKKMLAEWEAHIGSGAKTVVLDIPLLFESGLQSWMDKVLVVYVDDDVQLRRLMARNGFTEEEALKRIRSQWPSAAKVKRADAVIDNNGNIEETRRQLLDILHQWDLLDKGGSGHHHHHH

SEQ ID NO: 4545 - DNA, 639 bp, synthetic construct
  misc_feature 1..639: note = Variant of 3'O-kinase
  source 1..639: mol_type = other DNA
atggcggttaccattggtttaacaggagggatcgcagcgggcaaatcgactgtgagtgccatgatgcgtgaactgggtctgccggtcatcgatgctgacgaggcagcacgcgccgttatgaagccaggcgaagaagcgtatcgcgacattgtagctgaattcgggccgggcatccttcgtgcggatggcgagatcgatcgccagaaactgggtgctatccgcttttcggacgaacaaacgcgtaaggtgctgaattcgattgtaggtcctgcagtcctgaagaagatgctcgcggagtgggaagctcatatcgggtcaggcgccaagacggttgtgctggatatcccgctgctgttcgaatccggattgcaatcgtggatggacaaagttctcgtggtgtacgtcgatgatgatgttcagttacgccgccttatggcacgtaacgggtttactgaagaagaagctctgaagcgcattcgttcacagtggcccagtgcggagaaagttaaacgtgcagacgctgtcatcgacaataatggcaatattgaagaaacccgccgccagctgctggacattttacaccagtgggatctgctggacaaaggtggctccggccaccatcatcaccatcactaatga

SEQ ID NO: 4546 - protein, 211 aa, synthetic construct
  REGION 1..211: note = Variant of 3'O-kinase
MAVTIGLTGGIAAGKSTVSAMMRELGLPVIDADEAARAVMKPGEEAYRDIVAEFGPGILRADGEIDRQKLGAIRFSDEQTRKVLNSIVGPAVLKKMLAEWEAHIGSGAKTVVLDIPLLFESGLQSWMDKVLVVYVDDDVQLRRLMARNGFTEEEALKRIRSQWPSAEKVKRADAVIDNNGNIEETRRQLLDILHQWDLLDKGGSGHHHHHH

SEQ ID NO: 4547 - DNA, 639 bp, synthetic construct
  misc_feature 1..639: note = Variant of 3'O-kinase
  source 1..639: mol_type = other DNA
atggcggttaccattggtttaacaggagggatcgcagcgggcaaatcgactgtgagtgccatgatgcgtgaactgggtctgccggtcatcgatgctgacgaggcagcacgcgccgttatgaagccaggcgaagaagcgtatcgcgttattgtagctgaattcgggccgggcatccttcgtgcggatggcgagatcgatcgccagaaactgggtgctatccgcttttcggacgaacaacaacgtaaggtgctgaattcgattgtaggtcctgcagtcctgaagaagatgctcgcggagtgggaagctcatatcgggtcaggcgccaagacggttgtgctggatatcccgctgctgttcgaatccggattgcaatcgtggatggacaaagttctcgtggtgtacgtcgatgatgatgttcagttacgccgccttatggcacgtaacgggtttactgaagaagaagctctgaagcgcattcgttcacagtggcccagtgcggagaaagttaaacgtgcagacgctgtcatcgacaataatggcaatattgaagaaacccgccgccagctgctggacattttacaccagtgggatctgctggacaaaggtggctccggccaccatcatcaccatcactaatga

SEQ ID NO: 4548 - protein, 211 aa, synthetic construct
  REGION 1..211: note = Variant of 3'O-kinase
MAVTIGLTGGIAAGKSTVSAMMRELGLPVIDADEAARAVMKPGEEAYRVIVAEFGPGILRADGEIDRQKLGAIRFSDEQQRKVLNSIVGPAVLKKMLAEWEAHIGSGAKTVVLDIPLLFESGLQSWMDKVLVVYVDDDVQLRRLMARNGFTEEEALKRIRSQWPSAEKVKRADAVIDNNGNIEETRRQLLDILHQWDLLDKGGSGHHHHHH

SEQ ID NO: 4549 - DNA, 639 bp, synthetic construct
  misc_feature 1..639: note = Variant of 3'O-kinase
  source 1..639: mol_type = other DNA
atggcggttaccattggtttaacaggagggatcgcagcgggcaaatcgactgtgagtgccatgatgcgtgaactgggtctgccggtcatcgatgctgacgaggcagcacgcgccgttatgaagccaggcgaattggcgtatcgcgacattgtagctgaattcgggccgggcatccttcgtgcggatggcgagatcgatcgccagaaactgggtgctatccgcttttcggacgaacaacaacgtaaggtgctgaattcgattgtaggtcctgcagtcctgaagaagatgctcgcggagtgggaagctcatatcgggtcaggcgccaagacggttgtgctggatatcccgctgctgttcgaatccggattgcaatcgtggatggacaaagttctcgtggtgtacgtcgatgatgatgttcagttacgccgccttatggcacgtaacgggtttactgaagaagaagctctgaagcgcattcgttcacagtggcccagtgcggagaaagttaaacgtgcagacgctgtcatcgacaataatggcaatattgaagaaacccgccgccagctgctggacattttacaccagtgggatctgctggacaaaggtggctccggccaccatcatcaccatcactaatga

SEQ ID NO: 4550 - protein, 211 aa, synthetic construct
  REGION 1..211: note = Variant of 3'O-kinase
MAVTIGLTGGIAAGKSTVSAMMRELGLPVIDADEAARAVMKPGELAYRDIVAEFGPGILRADGEIDRQKLGAIRFSDEQQRKVLNSIVGPAVLKKMLAEWEAHIGSGAKTVVLDIPLLFESGLQSWMDKVLVVYVDDDVQLRRLMARNGFTEEEALKRIRSQWPSAEKVKRADAVIDNNGNIEETRRQLLDILHQWDLLDKGGSGHHHHHH

SEQ ID NO: 4551 - DNA, 639 bp, synthetic construct
  misc_feature 1..639: note = Variant of 3'O-kinase
  source 1..639: mol_type = other DNA
atggcggttaccattggtttaacaggagggatcgcagcgggcaaatcgactgtgagtgccatgatgcgtgaactgggtctgccggtctgggatgctgacgaggcagcacgcgccgttatgaagccaggcgaagaagcgtatcgcgacattgtagctgaattcgggccgggcatccttcgtgcggatggcgagatcgatcgccagaaactgggtgctatccgcttttcggacgaacaacaacgtaaggtgctgaattcgattgtaggtcctgcagtcctgaagaagatgctcgcggagtgggaagctcatatcgggtcaggcgccaagacggttgtgctggatatcccgctgctgttcgaatccggattgcaatcgtggatggacaaagttctcgtggtgtacgtcgatgatgatgttcagttacgccgccttatggcacgtaacgggtttactgaagaagaagctctgaagcgcattcgttcacagtggcccagtgcggagaaagttaaacgtgcagacgctgtcatcgacaataatggcaatattgaagaaacccgccgccagctgctggacattttacaccagtgggatctgctggacaaaggtggctccggccaccatcatcaccatcactaatga

SEQ ID NO: 4552 - protein, 211 aa, synthetic construct
  REGION 1..211: note = Variant of 3'O-kinase
MAVTIGLTGGIAAGKSTVSAMMRELGLPVWDADEAARAVMKPGEEAYRDIVAEFGPGILRADGEIDRQKLGAIRFSDEQQRKVLNSIVGPAVLKKMLAEWEAHIGSGAKTVVLDIPLLFESGLQSWMDKVLVVYVDDDVQLRRLMARNGFTEEEALKRIRSQWPSAEKVKRADAVIDNNGNIEETRRQLLDILHQWDLLDKGGSGHHHHHH

SEQ ID NO: 4553 - DNA, 639 bp, synthetic construct
  misc_feature 1..639: note = Variant of 3'O-kinase
  source 1..639: mol_type = other DNA
atggcggttaccattggtttaacaggagggatcgcagcgggcaaatcgactgtgagtgccatgatgcgtgaactgggtctgccggtcatcgatgctgacgaggcagcacgcgccgttatgaagccaggcgaagaagcgtatcgcgacattgtagctgaattcgggccgggcatccttcgtgcggatggcgagatcgatcgccagaaactgggtgctatccgcttttcggacgtgcaacaacgtaaggtgctgaattcgattgtaggtcctgcagtcctgaagaagatgctcgcggagtgggaagctcatatcgggtcaggcgccaagacggttgtgctggatatcccgctgctgttcgaatccggattgcaatcgtggatggacaaagttctcgtggtgtacgtcgatgatgatgttcagttacgccgccttatggcacgtaacgggtttactgaagaagaagctctgaagcgcattcgttcacagtggcccagtgcggagaaagttaaacgtgcagacgctgtcatcgacaataatggcaatattgaagaaacccgccgccagctgctggacattttacaccagtgggatctgctggacaaaggtggctccggccaccatcatcaccatcactaatga

SEQ ID NO: 4554 - protein, 211 aa, synthetic construct
  REGION 1..211: note = Variant of 3'O-kinase
MAVTIGLTGGIAAGKSTVSAMMRELGLPVIDADEAARAVMKPGEEAYRDIVAEFGPGILRADGEIDRQKLGAIRFSDVQQRKVLNSIVGPAVLKKMLAEWEAHIGSGAKTVVLDIPLLFESGLQSWMDKVLVVYVDDDVQLRRLMARNGFTEEEALKRIRSQWPSAEKVKRADAVIDNNGNIEETRRQLLDILHQWDLLDKGGSGHHHHHH

SEQ ID NO: 4555 - DNA, 639 bp, synthetic construct
  misc_feature 1..639: note = Variant of 3'O-kinase
  source 1..639: mol_type = other DNA
atggcggttaccattggtttaacaggagggatcgcagcgggcaaatcgactgtgagtgccatgatgcgtgaactgggtctgccggtcatcgatgctgacgaggcagcacgcgccgttatgaagccaggcgaagaagcgtatcgcgacattgtagctgaattcgggccgggcatccttcgtgcggatggcgagatcgatcgccagaaactgggtgctatccgcttttcggacgaacaacaacgtaaggtgctgaattcgattgtaggtcctgcagtcctgaagaagatgctcgcggagtgggaagctcatatcgggtcaggcgccaagacggttgtgctggatatcccgctgctgttcgaatccggattgcaatcgtggatggacaaagttctcgtgaattacgtcgatgatgatgttcagttacgccgccttatggcacgtaacgggtttactgaagaagaagctctgaagcgcattcgttcacagtggcccagtgcggagaaagttaaacgtgcagacgctgtcatcgacaataatggcaatattgaagaaacccgccgccagctgctggacattttacaccagtgggatctgctggacaaaggtggctccggccaccatcatcaccatcactaatga

SEQ ID NO: 4556 - protein, 211 aa, synthetic construct
  REGION 1..211: note = Variant of 3'O-kinase
MAVTIGLTGGIAAGKSTVSAMMRELGLPVIDADEAARAVMKPGEEAYRDIVAEFGPGILRADGEIDRQKLGAIRFSDEQQRKVLNSIVGPAVLKKMLAEWEAHIGSGAKTVVLDIPLLFESGLQSWMDKVLVNYVDDDVQLRRLMARNGFTEEEALKRIRSQWPSAEKVKRADAVIDNNGNIEETRRQLLDILHQWDLLDKGGSGHHHHHH

SEQ ID NO: 4557 - DNA, 639 bp, synthetic construct
  misc_feature 1..639: note = Variant of 3'O-kinase
  source 1..639: mol_type = other DNA
atggcggttaccattggtttaacaggagggatcgcagcgggcaaatcgactgtgagtgccatgatgcgtgaactgggtctgccggtcatcgatgctgacgaggcagcacgcgccgttatgaagccaggcgaagaagcgtatcgcgacattgtagctgaattcgggctgggcatccttcgtgcggatggcgagatcgatcgccagaaactgggtgctatccgcttttcggacgaacaacaacgtaaggtgctgaattcgattgtaggtcctgcagtcctgaagaagatgctcgcggagtgggaagctcatatcgggtcaggcgccaagacggttgtgctggatatcccgctgctgttcgaatccggattgcaatcgtggatggacaaagttctcgtggtgtacgtcgatgatgatgttcagttacgccgccttatggcacgtaacgggtttactgaagaagaagctctgaagcgcattcgttcacagtggcccagtgcggagaaagttaaacgtgcagacgctgtcatcgacaataatggcaatattgaagaaacccgccgccagctgctggacattttacaccagtgggatctgctggacaaaggtggctccggccaccatcatcaccatcactaatga

SEQ ID NO: 4558 - protein, 211 aa, synthetic construct
  REGION 1..211: note = Variant of 3'O-kinase
MAVTIGLTGGIAAGKSTVSAMMRELGLPVIDADEAARAVMKPGEEAYRDIVAEFGLGILRADGEIDRQKLGAIRFSDEQQRKVLNSIVGPAVLKKMLAEWEAHIGSGAKTVVLDIPLLFESGLQSWMDKVLVVYVDDDVQLRRLMARNGFTEEEALKRIRSQWPSAEKVKRADAVIDNNGNIEETRRQLLDILHQWDLLDKGGSGHHHHHH

SEQ ID NO: 4559 - DNA, 639 bp, synthetic construct
  misc_feature 1..639: note = Variant of 3'O-kinase
  source 1..639: mol_type = other DNA
atggcggttaccattggtttaacaggagggatcgcagcgggcaaatcgactgtgagtgccatgatgcgtgaactgggtctgccggtcatcgatgctgacgaggcagcacgcgccgttatgaagccaggcgaagaagcgtatcgcgacattgtagctgaattcgggccgggcatccttcgtgcggatggcgagatcgatcgccagaaactgggtgctatccgcttttcggacgaacaacaacgtaaggagctgaattcgattgtaggtcctgcagtcctgaagaagatgctcgcggagtgggaagctcatatcgggtcaggcgccaagacggttgtgctggatatcccgctgctgttcgaatccggattgcaatcgtggatggacaaagttctcgtggtgtacgtcgatgatgatgttcagttacgccgccttatggcacgtaacgggtttactgaagaagaagctctgaagcgcattcgttcacagtggcccagtgcggagaaagttaaacgtgcagacgctgtcatcgacaataatggcaatattgaagaaacccgccgccagctgctggacattttacaccagtgggatctgctggacaaaggtggctccggccaccatcatcaccatcactaatga

SEQ ID NO: 4560 - protein, 211 aa, synthetic construct
  REGION 1..211: note = Variant of 3'O-kinase
MAVTIGLTGGIAAGKSTVSAMMRELGLPVIDADEAARAVMKPGEEAYRDIVAEFGPGILRADGEIDRQKLGAIRFSDEQQRKELNSIVGPAVLKKMLAEWEAHIGSGAKTVVLDIPLLFESGLQSWMDKVLVVYVDDDVQLRRLMARNGFTEEEALKRIRSQWPSAEKVKRADAVIDNNGNIEETRRQLLDILHQWDLLDKGGSGHHHHHH

SEQ ID NO: 4561 - DNA, 639 bp, synthetic construct
  misc_feature 1..639: note = Variant of 3'O-kinase
  source 1..639: mol_type = other DNA
atggcggttaccattggtttaacaggagggatcgcagcgggcaaatcgactgtgagtgccatgatgcgtgaactgggtctgccggtcatcgatgctgacgaggcagcacgcgccgttatgaagccaggcgaagaagcgtatcgcgacattgtagctgaattcgggccgggcatccttcgtgcggatggcgagatcgatcgccagaaactgggtgctatccgcttttcggacgaacaacaacgtaaggtgctgaattcgattgtaggtcctgcagtcctgaagaagatgctcgcggagtgggaagctcatatcgggtcaggcgccaagacggttgtgctggatatcccgctgctgttcgaatccggattgcaatcgtggatggacaaagttctcgtggtgtacgtcgatgatgatgttcagttacgccgccttatggcacgtaacgggtttactgaagaagaagctctgaagcgcattcgttcacagtggcccagtgcggagaaagttaaacgtgcagacgctgtcatcgacaataatggcaatattgaagaaacccgccgccagctgctgggtattttacaccagtgggatctgctggacaaaggtggctccggccaccatcatcaccatcactaatga

SEQ ID NO: 4562 - protein, 211 aa, synthetic construct
  REGION 1..211: note = Variant of 3'O-kinase
MAVTIGLTGGIAAGKSTVSAMMRELGLPVIDADEAARAVMKPGEEAYRDIVAEFGPGILRADGEIDRQKLGAIRFSDEQQRKVLNSIVGPAVLKKMLAEWEAHIGSGAKTVVLDIPLLFESGLQSWMDKVLVVYVDDDVQLRRLMARNGFTEEEALKRIRSQWPSAEKVKRADAVIDNNGNIEETRRQLLGILHQWDLLDKGGSGHHHHHH

SEQ ID NO: 4563 - DNA, 639 bp, synthetic construct
  misc_feature 1..639: note = Variant of 3'O-kinase
  source 1..639: mol_type = other DNA
atggcggttaccattggtttaacaggagggatcgcagcgggcaaatcgactgtgagtgccatgatgcgtgaactgggtctgccggtcatcgatgctgacgaggcagcacgcgccgttatgaagccaggcgaagaagcgtatcgcgacattgtagctgaattcgggccgggcatccttcgtgcggatggcgagatcgatcgccagaaactgggtgctatccgcttttcggacgaacaacaacgtaaggtgctgaattcgattgtaggtcctgcagtcctgaagaagatgctcgcggagtgggaagctcatatcgggtcaggcgccaagacggttgtgctggatatcccgctgctgttcgaatccggattgcaatcgtggatggacaaagttctcgtggtgtacgtcgatgatgatgttcagttacgccgccttatggcacgtaacgggtttactgaagaacaggctctgaagcgcattcgttcacagtggcccagtgcggagaaagttaaacgtgcagacgctgtcatcgacaataatggcaatattgaagaaacccgccgccagctgctggacattttacaccagtgggatctgctggacaaaggtggctccggccaccatcatcaccatcactaatga

SEQ ID NO: 4564 - protein, 211 aa, synthetic construct
  REGION 1..211: note = Variant of 3'O-kinase
MAVTIGLTGGIAAGKSTVSAMMRELGLPVIDADEAARAVMKPGEEAYRDIVAEFGPGILRADGEIDRQKLGAIRFSDEQQRKVLNSIVGPAVLKKMLAEWEAHIGSGAKTVVLDIPLLFESGLQSWMDKVLVVYVDDDVQLRRLMARNGFTEEQALKRIRSQWPSAEKVKRADAVIDNNGNIEETRRQLLDILHQWDLLDKGGSGHHHHHH

SEQ ID NO: 4565 - DNA, 639 bp, synthetic construct
  misc_feature 1..639: note = Variant of 3'O-kinase
  source 1..639: mol_type = other DNA
atggcggttaccattggtttaacaggagggatcgcagcgggcaaatcgactgtgagtgccatgatgcgtgaactgggtctgccggtcatcgatgctgacgagcgtgcacgcgccgttatgaagccaggcgaagaagcgtatcgcgacattgtagctgaattcgggccgggcatccttcgtgcggatggcgagatcgatcgccagaaactgggtgctatccgcttttcggacgaacaacaacgtaaggtgctgaattcgattgtaggtcctgcagtcctgaagaagatgctcgcggagtgggaagctcatatcgggtcaggcgccaagacggttgtgctggatatcccgctgctgttcgaatccggattgcaatcgtggatggacaaagttctcgtggtgtacgtcgatgatgatgttcagttacgccgccttatggcacgtaacgggtttactgaagaagaagctctgaagcgcattcgttcacagtggcccagtgcggagaaagttaaacgtgcagacgctgtcatcgacaataatggcaatattgaagaaacccgccgccagctgctggacattttacaccagtgggatctgctggacaaaggtggctccggccaccatcatcaccatcactaatga

SEQ ID NO: 4566 - protein, 211 aa, synthetic construct
  REGION 1..211: note = Variant of 3'O-kinase
MAVTIGLTGGIAAGKSTVSAMMRELGLPVIDADERARAVMKPGEEAYRDIVAEFGPGILRADGEIDRQKLGAIRFSDEQQRKVLNSIVGPAVLKKMLAEWEAHIGSGAKTVVLDIPLLFESGLQSWMDKVLVVYVDDDVQLRRLMARNGFTEEEALKRIRSQWPSAEKVKRADAVIDNNGNIEETRRQLLDILHQWDLLDKGGSGHHHHHH

SEQ ID NO: 4567 - DNA, 639 bp, synthetic construct
  misc_feature 1..639: note = Variant of 3'O-kinase
  source 1..639: mol_type = other DNA
atggcggttaccattggtttaacaggagggatcgcagcgggcaaatcgactgtgagtgccatgatgcgtgaactgggtctgccggtcatcgatgctgacgaggcagcacgcgccgttatgaagccaggcgaagaagcgtatcgcgacattgtacaggaattcgggccgggcatccttcgtgcggatggcgagatcgatcgccagaaactgggtgctatccgcttttcggacgaacaacaacgtaaggtgctgaattcgattgtaggtcctgcagtcctgaagaagatgctcgcggagtgggaagctcatatcgggtcaggcgccaagacggttgtgctggatatcccgctgctgttcgaatccggattgcaatcgtggatggacaaagttctcgtggtgtacgtcgatgatgatgttcagttacgccgccttatggcacgtaacgggtttactgaagaagaagctctgaagcgcattcgttcacagtggcccagtgcggagaaagttaaacgtgcagacgctgtcatcgacaataatggcaatattgaagaaacccgccgccagctgctggacattttacaccagtgggatctgctggacaaaggtggctccggccaccatcatcaccatcactaatga

SEQ ID NO: 4568 - protein, 211 aa, synthetic construct
  REGION 1..211: note = Variant of 3'O-kinase
MAVTIGLTGGIAAGKSTVSAMMRELGLPVIDADEAARAVMKPGEEAYRDIVQEFGPGILRADGEIDRQKLGAIRFSDEQQRKVLNSIVGPAVLKKMLAEWEAHIGSGAKTVVLDIPLLFESGLQSWMDKVLVVYVDDDVQLRRLMARNGFTEEEALKRIRSQWPSAEKVKRADAVIDNNGNIEETRRQLLDILHQWDLLDKGGSGHHHHHH

SEQ ID NO: 4569 - DNA, 639 bp, synthetic construct
  misc_feature 1..639: note = Variant of 3'O-kinase
  source 1..639: mol_type = other DNA
atggcggttaccattggtttaacaggagggatcgcagcgggcaaatcgactgtgagtgccatgatgcgtgaactgggtctgccggtcatcgatgctgacgaggcagcacgcgccgttatgaagccaggcgaagaagcgtatcgcgacattgtagctgaattcgggccgggcatccttcgtgcggatggcgagatcgatcgccagaaactgggtgctatccgcttttcggacgaacaacaacgtaaggtgctgaattcgattgtaggtcctgcagtcctgaagaagatgctcgcggagtgggaagctcatatcgggtcaggcgccaagacggttgtgctggatatcccgctgctgttcgaagagggattgcaatcgtggatggacaaagttctcgtggtgtacgtcgatgatgatgttcagttacgccgccttatggcacgtaacgggtttactgaagaagaagctctgaagcgcattcgttcacagtggcccagtgcggagaaagttaaacgtgcagacgctgtcatcgacaataatggcaatattgaagaaacccgccgccagctgctggacattttacaccagtgggatctgctggacaaaggtggctccggccaccatcatcaccatcactaatga

SEQ ID NO: 4570 - protein, 211 aa, synthetic construct
  REGION 1..211: note = Variant of 3'O-kinase
MAVTIGLTGGIAAGKSTVSAMMRELGLPVIDADEAARAVMKPGEEAYRDIVAEFGPGILRADGEIDRQKLGAIRFSDEQQRKVLNSIVGPAVLKKMLAEWEAHIGSGAKTVVLDIPLLFEEGLQSWMDKVLVVYVDDDVQLRRLMARNGFTEEEALKRIRSQWPSAEKVKRADAVIDNNGNIEETRRQLLDILHQWDLLDKGGSGHHHHHH

SEQ ID NO: 4571 - DNA, 639 bp, synthetic construct
  misc_feature 1..639: note = Variant of 3'O-kinase
  source 1..639: mol_type = other DNA
atggcggttaccattggtttaacaggagggatcgcagcgggcaaatcgactgtgagtgccatgatgcgtgaactgggtctgccggtcatcgatgctgacgaggcagcacgcgccgttatgaagccaggcgaagaagcgtatcgcgacattgtagctgaattcgggccgggcatccttgtggcggatggcgagatcgatcgccagaaactgggtgctatccgcttttcggacgaacaacaacgtaaggtgctgaattcgattgtaggtcctgcagtcctgaagaagatgctcgcggagtgggaagctcatatcgggtcaggcgccaagacggttgtgctggatatcccgctgctgttcgaatccggattgcaatcgtggatggacaaagttctcgtggtgtacgtcgatgatgatgttcagttacgccgccttatggcacgtaacgggtttactgaagaagaagctctgaagcgcattcgttcacagtggcccagtgcggagaaagttaaacgtgcagacgctgtcatcgacaataatggcaatattgaagaaacccgccgccagctgctggacattttacaccagtgggatctgctggacaaaggtggctccggccaccatcatcaccatcactaatga

SEQ ID NO: 4572 - protein, 211 aa, synthetic construct
  REGION 1..211: note = Variant of 3'O-kinase
MAVTIGLTGGIAAGKSTVSAMMRELGLPVIDADEAARAVMKPGEEAYRDIVAEFGPGILVADGEIDRQKLGAIRFSDEQQRKVLNSIVGPAVLKKMLAEWEAHIGSGAKTVVLDIPLLFESGLQSWMDKVLVVYVDDDVQLRRLMARNGFTEEEALKRIRSQWPSAEKVKRADAVIDNNGNIEETRRQLLDILHQWDLLDKGGSGHHHHHH

SEQ ID NO: 4573 - DNA, 639 bp, synthetic construct
  misc_feature 1..639: note = Variant of 3'O-kinase
  source 1..639: mol_type = other DNA
atggcggttaccattggtttaacaggagggatcgcagcgggcaaatcgactgtgagtgccatgatgcgtgaactgggtctgccggtcatcgatgctgacgaggcatctcgcgccgttatgaagccaggcgaagaagcgtatcgcgacattgtagctgaattcgggccgggcatccttcgtgcggatggcgagatcgatcgccagaaactgggtgctatccgcttttcggacgaacaacaacgtaaggtgctgaattcgattgtaggtcctgcagtcctgaagaagatgctcgcggagtgggaagctcatatcgggtcaggcgccaagacggttgtgctggatatcccgctgctgttcgaatccggattgcaatcgtggatggacaaagttctcgtggtgtacgtcgatgatgatgttcagttacgccgccttatggcacgtaacgggtttactgaagaagaagctctgaagcgcattcgttcacagtggcccagtgcggagaaagttaaacgtgcagacgctgtcatcgacaataatggcaatattgaagaaacccgccgccagctgctggacattttacaccagtgggatctgctggacaaaggtggctccggccaccatcatcaccatcactaatga

SEQ ID NO: 4574 - protein, 211 aa, synthetic construct
  REGION 1..211: note = Variant of 3'O-kinase
MAVTIGLTGGIAAGKSTVSAMMRELGLPVIDADEASRAVMKPGEEAYRDIVAEFGPGILRADGEIDRQKLGAIRFSDEQQRKVLNSIVGPAVLKKMLAEWEAHIGSGAKTVVLDIPLLFESGLQSWMDKVLVVYVDDDVQLRRLMARNGFTEEEALKRIRSQWPSAEKVKRADAVIDNNGNIEETRRQLLDILHQWDLLDKGGSGHHHHHH

SEQ ID NO: 4575 - DNA, 639 bp, synthetic construct
  misc_feature 1..639: note = Variant of 3'O-kinase
  source 1..639: mol_type = other DNA
atggcggttaccattggtttaacaggagggatcgcagcgggcaaatcgactgtgagtgccatgatgcgtgaactgggtctgccggtcatcgatgctgacgaggcagcacgcgccgttatgaagccaggcgaagaagcgtatcgcgacattgtagctgaattcgggccgggcatccttcgtgcggatggcgagatcgatcgccagaaactgggtgctatccgcttttcggacgaacaacaacgtcatgtgctgaattcgattgtaggtcctgcagtcctgaagaagatgctcgcggagtgggaagctcatatcgggtcaggcgccaagacggttgtgctggatatcccgctgctgttcgaatccggattgcaatcgtggatggacaaagttctcgtggtgtacgtcgatgatgatgttcagttacgccgccttatggcacgtaacgggtttactgaagaagaagctctgaagcgcattcgttcacagtggcccagtgcggagaaagttaaacgtgcagacgctgtcatcgacaataatggcaatattgaagaaacccgccgccagctgctggacattttacaccagtgggatctgctggacaaaggtggctccggccaccatcatcaccatcactaatga

SEQ ID NO: 4576 - protein, 211 aa, synthetic construct
  REGION 1..211: note = Variant of 3'O-kinase
MAVTIGLTGGIAAGKSTVSAMMRELGLPVIDADEAARAVMKPGEEAYRDIVAEFGPGILRADGEIDRQKLGAIRFSDEQQRHVLNSIVGPAVLKKMLAEWEAHIGSGAKTVVLDIPLLFESGLQSWMDKVLVVYVDDDVQLRRLMARNGFTEEEALKRIRSQWPSAEKVKRADAVIDNNGNIEETRRQLLDILHQWDLLDKGGSGHHHHHH

SEQ ID NO: 4577 - DNA, 639 bp, synthetic construct
  misc_feature 1..639: note = Variant of 3'O-kinase
  source 1..639: mol_type = other DNA
atggcggttaccattggtttaacaggagggatcgcagcgggcaaatcgactgtgagtgccatgatgcgtgaactgggtctgccggtcatcgatgctgacgaggcagcacgcgccgttatgaagccaggcgaagaagcgtatcgcgacattgtagctgaattcgggccgggcatccttcgtgcggatggcgagatcgatcgccagaaactgggtgctatccgcttttcggacgaacaacaacgtaaggtgctgaattcgattgtaggtcctgcagtcctgaagaagatgctcgcggagtgggaagctcatgctgggtcaggcgccaagacggttgtgctggatatcccgctgctgttcgaatccggattgcaatcgtggatggacaaagttctcgtggtgtacgtcgatgatgatgttcagttacgccgccttatggcacgtaacgggtttactgaagaagaagctctgaagcgcattcgttcacagtggcccagtgcggagaaagttaaacgtgcagacgctgtcatcgacaataatggcaatattgaagaaacccgccgccagctgctggacattttacaccagtgggatctgctggacaaaggtggctccggccaccatcatcaccatcactaatga

SEQ ID NO: 4578 - protein, 211 aa, synthetic construct
  REGION 1..211: note = Variant of 3'O-kinase
MAVTIGLTGGIAAGKSTVSAMMRELGLPVIDADEAARAVMKPGEEAYRDIVAEFGPGILRADGEIDRQKLGAIRFSDEQQRKVLNSIVGPAVLKKMLAEWEAHAGSGAKTVVLDIPLLFESGLQSWMDKVLVVYVDDDVQLRRLMARNGFTEEEALKRIRSQWPSAEKVKRADAVIDNNGNIEETRRQLLDILHQWDLLDKGGSGHHHHHH

SEQ ID NO: 4579 - DNA, 639 bp, synthetic construct
  misc_feature 1..639: note = Variant of 3'O-kinase
  source 1..639: mol_type = other DNA
atggcggttaccattggtttaacaggagggatcgcagcgggcaaatcgactgtgagtgccatgatgcgtgaactgggtctgccggtcatcgatgctgacgaggcagcacgcgccgttatgaagccaggcgaagaagcgtatcgcgacattgtagctgaattcgggccgggcatccttcgtcatgatggcgagatcgatcgccagaaactgggtgctatccgcttttcggacgaacaacaacgtaaggtgctgaattcgattgtaggtcctgcagtcctgaagaagatgctcgcggagtgggaagctcatatcgggtcaggcgccaagacggttgtgctggatatcccgctgctgttcgaatccggattgcaatcgtggatggacaaagttctcgtggtgtacgtcgatgatgatgttcagttacgccgccttatggcacgtaacgggtttactgaagaagaagctctgaagcgcattcgttcacagtggcccagtgcggagaaagttaaacgtgcagacgctgtcatcgacaataatggcaatattgaagaaacccgccgccagctgctggacattttacaccagtgggatctgctggacaaaggtggctccggccaccatcatcaccatcactaatga

SEQ ID NO: 4580 - protein, 211 aa, synthetic construct
  REGION 1..211: note = Variant of 3'O-kinase
MAVTIGLTGGIAAGKSTVSAMMRELGLPVIDADEAARAVMKPGEEAYRDIVAEFGPGILRHDGEIDRQKLGAIRFSDEQQRKVLNSIVGPAVLKKMLAEWEAHIGSGAKTVVLDIPLLFESGLQSWMDKVLVVYVDDDVQLRRLMARNGFTEEEALKRIRSQWPSAEKVKRADAVIDNNGNIEETRRQLLDILHQWDLLDKGGSGHHHHHH

SEQ ID NO: 4581 - DNA, 639 bp, synthetic construct
  misc_feature 1..639: note = Variant of 3'O-kinase
  source 1..639: mol_type = other DNA
atggcggttaccattggtttaacaggagggatcgcagcgggcaaatcgactgtgagtgccatgatgcgtgaactgggtctgccggtcatcgatgctgacgaggcagcacgcgccgttatgaagccaggcgaagaagcgtatcgcgacattgtagctgaattcgggccgggcatccttcgtgcggatggcgagatcgatcgccagaaactgggtgctatccgcttttcggacgaacaacaacgtaaggtgctgaattcgattgtaggtcctgcagtcctgaagaagatgctcgcggagtgggaagctcatatcgggtcaggcgccaagacggttgtgctggatatcccgctgctgttcgaatccggattgcaatcgtggatggacaaagttctcgtggtgtacgtcgatgatgatgttcagttacgccgccttatggcacgtaacgggtttactcttgaagaagctctgaagcgcattcgttcacagtggcccagtgcggagaaagttaaacgtgcagacgctgtcatcgacaataatggcaatattgaagaaacccgccgccagctgctggacattttacaccagtgggatctgctggacaaaggtggctccggccaccatcatcaccatcactaatga

SEQ ID NO: 4582 - protein, 211 aa, synthetic construct
  REGION 1..211: note = Variant of 3'O-kinase
MAVTIGLTGGIAAGKSTVSAMMRELGLPVIDADEAARAVMKPGEEAYRDIVAEFGPGILRADGEIDRQKLGAIRFSDEQQRKVLNSIVGPAVLKKMLAEWEAHIGSGAKTVVLDIPLLFESGLQSWMDKVLVVYVDDDVQLRRLMARNGFTLEEALKRIRSQWPSAEKVKRADAVIDNNGNIEETRRQLLDILHQWDLLDKGGSGHHHHHH

SEQ ID NO: 4583 - DNA, 639 bp, synthetic construct
  misc_feature 1..639: note = Variant of 3'O-kinase
  source 1..639: mol_type = other DNA
atggcggttaccattggtttaacaggagggatcgcagcgggcaaatcgactgtgagtgccatgatgcgtgaactgggtctgccggtcatcgatgctgacgaggcagcacgcgccgttatgaagccaggcgaagaagcgtatcgcgacattgtagctgaattcgggccgggcatccttcgtgcggatggcgagatcgatcgccagaaactgggtgctatccgcttttcggacgaacaacaacgtaaggtgctgaattcgattgtaggtcctgcagtcctgaagaagatgctcgcggagtgggaagctcatatcgggtcaggcgccgatacggttgtgctggatatcccgctgctgttcgaatccggattgcaatcgtggatggacaaagttctcgtggtgtacgtcgatgatgatgttcagttacgccgccttatggcacgtaacgggtttactgaagaagaagctctgaagcgcattcgttcacagtggcccagtgcggagaaagttaaacgtgcagacgctgtcatcgacaataatggcaatattgaagaaacccgccgccagctgctggacattttacaccagtgggatctgctggacaaaggtggctccggccaccatcatcaccatcactaatga

SEQ ID NO: 4584 - protein, 211 aa, synthetic construct
  REGION 1..211: note = Variant of 3'O-kinase
MAVTIGLTGGIAAGKSTVSAMMRELGLPVIDADEAARAVMKPGEEAYRDIVAEFGPGILRADGEIDRQKLGAIRFSDEQQRKVLNSIVGPAVLKKMLAEWEAHIGSGADTVVLDIPLLFESGLQSWMDKVLVVYVDDDVQLRRLMARNGFTEEEALKRIRSQWPSAEKVKRADAVIDNNGNIEETRRQLLDILHQWDLLDKGGSGHHHHHH

SEQ ID NO: 4585 - DNA, 639 bp, synthetic construct
  misc_feature 1..639: note = Variant of 3'O-kinase
  source 1..639: mol_type = other DNA
atggcggttaccattggtttaacaggagggatcgcagcgggcaaatcgactgtgagtgccatgatgcgtgaactgggtctgccggtcatcgatgctgacgaggcagcacgcgccgttatgaagccaggcgaagaagcgtatcgcgacattgtagctgaattcgggccgggcatccttcgtgcggatggcgagatcgatcgccagaaactgggtgctatccgcttttcggacgaacaacaacgtaaggtgctgaattcgattgtaggtcctgcagtcctgaagaagatgctcgcggagtgggaagctcatatcgggtcaggcgccaagacggttgtgctggatatcccgctgctgttcgaatccggattgcaatcgtggatggacaaagttctcgtggtgtacgtcgatgatgatcagcagttacgccgccttatggcacgtaacgggtttactgaagaagaagctctgaagcgcattcgttcacagtggcccagtgcggagaaagttaaacgtgcagacgctgtcatcgacaataatggcaatattgaagaaacccgccgccagctgctggacattttacaccagtgggatctgctggacaaaggtggctccggccaccatcatcaccatcactaatga

SEQ ID NO: 4586 - protein, 211 aa, synthetic construct
  REGION 1..211: note = Variant of 3'O-kinase
MAVTIGLTGGIAAGKSTVSAMMRELGLPVIDADEAARAVMKPGEEAYRDIVAEFGPGILRADGEIDRQKLGAIRFSDEQQRKVLNSIVGPAVLKKMLAEWEAHIGSGAKTVVLDIPLLFESGLQSWMDKVLVVYVDDDQQLRRLMARNGFTEEEALKRIRSQWPSAEKVKRADAVIDNNGNIEETRRQLLDILHQWDLLDKGGSGHHHHHH

SEQ ID NO: 4587 - DNA, 639 bp, synthetic construct
  misc_feature 1..639: note = Variant of 3'O-kinase
  source 1..639: mol_type = other DNA
atggcggttaccattggtttaacaggagggatcgcagcgggcaaatcgactgtgagtgccatgatgcgtgaactgggtctgccggtcatcgatgctgacgaggcagcacgcgccgttatgaagccaggcgaagaagcgtatcgcgacattgtagctgaattcgggccgggcatccttcgtgcggatggcgagatcgatcgccagaaactgggtgctatccgctttacggacgaacaacaacgtaaggtgctgaattcgattgtaggtcctgcagtcctgaagaagatgctcgcggagtgggaagctcatatcgggtcaggcgccaagacggttgtgctggatatcccgctgctgttcgaatccggattgcaatcgtggatggacaaagttctcgtggtgtacgtcgatgatgatgttcagttacgccgccttatggcacgtaacgggtttactgaagaagaagctctgaagcgcattcgttcacagtggcccagtgcggagaaagttaaacgtgcagacgctgtcatcgacaataatggcaatattgaagaaacccgccgccagctgctggacattttacaccagtgggatctgctggacaaaggtggctccggccaccatcatcaccatcactaatga

SEQ ID NO: 4588 - protein, 211 aa, synthetic construct
  REGION 1..211: note = Variant of 3'O-kinase
MAVTIGLTGGIAAGKSTVSAMMRELGLPVIDADEAARAVMKPGEEAYRDIVAEFGPGILRADGEIDRQKLGAIRFTDEQQRKVLNSIVGPAVLKKMLAEWEAHIGSGAKTVVLDIPLLFESGLQSWMDKVLVVYVDDDVQLRRLMARNGFTEEEALKRIRSQWPSAEKVKRADAVIDNNGNIEETRRQLLDILHQWDLLDKGGSGHHHHHH

SEQ ID NO: 4589 - DNA, 639 bp, synthetic construct
  misc_feature 1..639: note = Variant of 3'O-kinase
  source 1..639: mol_type = other DNA
atggcggttaccattggtttaacaggagggatcgcagcgggcaaatcgactgtgagtgccatgatgcgtgaactgggtctgccggtcatcgatgctgacgaggcagcacgcgccgttatgaagccaggcgaagaagcgtatcgcgacattgtagctgaattcgggccgggcatccttcgtgcggatggcgagatcgatcgccagaaactgggtgctatccgcttttcggacgaacaacaacgtaaggtgctgaattcgattgtaggtcctgcagtcctgaagaagatgggggcggagtgggaagctcatatcgggtcaggcgccaagacggttgtgctggatatcccgctgctgttcgaatccggattgcaatcgtggatggacaaagttctcgtggtgtacgtcgatgatgatgttcagttacgccgccttatggcacgtaacgggtttactgaagaagaagctctgaagcgcattcgttcacagtggcccagtgcggagaaagttaaacgtgcagacgctgtcatcgacaataatggcaatattgaagaaacccgccgccagctgctggacattttacaccagtgggatctgctggacaaaggtggctccggccaccatcatcaccatcactaatga

SEQ ID NO: 4590 - protein, 211 aa, synthetic construct
  REGION 1..211: note = Variant of 3'O-kinase
MAVTIGLTGGIAAGKSTVSAMMRELGLPVIDADEAARAVMKPGEEAYRDIVAEFGPGILRADGEIDRQKLGAIRFSDEQQRKVLNSIVGPAVLKKMGAEWEAHIGSGAKTVVLDIPLLFESGLQSWMDKVLVVYVDDDVQLRRLMARNGFTEEEALKRIRSQWPSAEKVKRADAVIDNNGNIEETRRQLLDILHQWDLLDKGGSGHHHHHH

SEQ ID NO: 4591 - DNA, 639 bp, synthetic construct
  misc_feature 1..639: note = Variant of 3'O-kinase
  source 1..639: mol_type = other DNA
atggcggttaccattggtttaacaggagggatcgcagcgggcaaatcgactgtgagtgccatgatgcgtgaactgggtctgccggtcatcgatgctgacgaggcagcacgcgccgttatgaagccaggcgaagaagcgtatcgcgacattgtagctgaattcgggccgggcatccttcgtgcggatggcgagatcgatcgccagaaactgggtgctatccgcttttcggacgaacaacaacgtaaggtgctgaattcgattgtaggtcctgcagcgctgaagaagatgctcgcggagtgggaagctcatatcgggtcaggcgccaagacggttgtgctggatatcccgctgctgttcgaatccggattgcaatcgtggatggacaaagttctcgtggtgtacgtcgatgatgatgttcagttacgccgccttatggcacgtaacgggtttactgaagaagaagctctgaagcgcattcgttcacagtggcccagtgcggagaaagttaaacgtgcagacgctgtcatcgacaataatggcaatattgaagaaacccgccgccagctgctggacattttacaccagtgggatctgctggacaaaggtggctccggccaccatcatcaccatcactaatga

SEQ ID NO: 4592 - protein, 211 aa, synthetic construct
  REGION 1..211: note = Variant of 3'O-kinase
MAVTIGLTGGIAAGKSTVSAMMRELGLPVIDADEAARAVMKPGEEAYRDIVAEFGPGILRADGEIDRQKLGAIRFSDEQQRKVLNSIVGPAALKKMLAEWEAHIGSGAKTVVLDIPLLFESGLQSWMDKVLVVYVDDDVQLRRLMARNGFTEEEALKRIRSQWPSAEKVKRADAVIDNNGNIEETRRQLLDILHQWDLLDKGGSGHHHHHH

SEQ ID NO: 4593 - DNA, 639 bp, synthetic construct
  misc_feature 1..639: note = Variant of 3'O-kinase
  source 1..639: mol_type = other DNA
atggcggttaccattggtttaacaggagggatcgcagcgggcaaatcgactgtgagtgccatgatgcgtgaactgggtctgccggtcatcgatgctgacgaggcagcacgcgccgttatgaagccaggcgaagaagcgtatcgcgacattgtagctgaattcgggccgggcatccttcgtgcggatggcgagatcgatcgccagaaactgggtgctatccgcttttcggacgaacaacaacgtaaggtgctgaattcgattgtaggtcctgcagtcctgaagaagatgctcgcggagagggaagctcatatcgggtcaggcgccaagacggttgtgctggatatcccgctgctgttcgaatccggattgcaatcgtggatggacaaagttctcgtggtgtacgtcgatgatgatgttcagttacgccgccttatggcacgtaacgggtttactgaagaagaagctctgaagcgcattcgttcacagtggcccagtgcggagaaagttaaacgtgcagacgctgtcatcgacaataatggcaatattgaagaaacccgccgccagctgctggacattttacaccagtgggatctgctggacaaaggtggctccggccaccatcatcaccatcactaatga

SEQ ID NO: 4594 - protein, 211 aa, synthetic construct
  REGION 1..211: note = Variant of 3'O-kinase
MAVTIGLTGGIAAGKSTVSAMMRELGLPVIDADEAARAVMKPGEEAYRDIVAEFGPGILRADGEIDRQKLGAIRFSDEQQRKVLNSIVGPAVLKKMLAEREAHIGSGAKTVVLDIPLLFESGLQSWMDKVLVVYVDDDVQLRRLMARNGFTEEEALKRIRSQWPSAEKVKRADAVIDNNGNIEETRRQLLDILHQWDLLDKGGSGHHHHHH

SEQ ID NO: 4595 - DNA, 639 bp, synthetic construct
  misc_feature 1..639: note = Variant of 3'O-kinase
  source 1..639: mol_type = other DNA
atggcggttaccattggtttaacaggagggatcgcagcgggcaaatcgactgtgagtgccatgatgcgtgaactgggtctgccggtcatcgatgctgacgaggcagggcgcgccgttatgaagccaggcgaagaagcgtatcgcgacattgtagctgaattcgggccgggcatccttcgtgcggatggcgagatcgatcgccagaaactgggtgctatccgcttttcggacgaacaacaacgtaaggtgctgaattcgattgtaggtcctgcagtcctgaagaagatgctcgcggagtgggaagctcatatcgggtcaggcgccaagacggttgtgctggatatcccgctgctgttcgaatccggattgcaatcgtggatggacaaagttctcgtggtgtacgtcgatgatgatgttcagttacgccgccttatggcacgtaacgggtttactgaagaagaagctctgaagcgcattcgttcacagtggcccagtgcggagaaagttaaacgtgcagacgctgtcatcgacaataatggcaatattgaagaaacccgccgccagctgctggacattttacaccagtgggatctgctggacaaaggtggctccggccaccatcatcaccatcactaatga

SEQ ID NO: 4596 - protein, 211 aa, synthetic construct
  REGION 1..211: note = Variant of 3'O-kinase
MAVTIGLTGGIAAGKSTVSAMMRELGLPVIDADEAGRAVMKPGEEAYRDIVAEFGPGILRADGEIDRQKLGAIRFSDEQQRKVLNSIVGPAVLKKMLAEWEAHIGSGAKTVVLDIPLLFESGLQSWMDKVLVVYVDDDVQLRRLMARNGFTEEEALKRIRSQWPSAEKVKRADAVIDNNGNIEETRRQLLDILHQWDLLDKGGSGHHHHHH

SEQ ID NO: 4597 - DNA, 639 bp, synthetic construct
  misc_feature 1..639: note = Variant of 3'O-kinase
  source 1..639: mol_type = other DNA
atggcggttaccattggtttaacaggagggatcgcagcgggcaaatcgactgtgagtgccatgatgcgtgaactgggtctgccggtcatcgatgctgacgaggcagcacgcgccgttatgaagccaggcgaagaagcgtatcgcgacattgtactggaattcgggccgggcatccttcgtgcggatggcgagatcgatcgccagaaactgggtgctatccgcttttcggacgaacaacaacgtaaggtgctgaattcgattgtaggtcctgcagtcctgaagaagatgctcgcggagtgggaagctcatatcgggtcaggcgccaagacggttgtgctggatatcccgctgctgttcgaatccggattgcaatcgtggatggacaaagttctcgtggtgtacgtcgatgatgatgttcagttacgccgccttatggcacgtaacgggtttactgaagaagaagctctgaagcgcattcgttcacagtggcccagtgcggagaaagttaaacgtgcagacgctgtcatcgacaataatggcaatattgaagaaacccgccgccagctgctggacattttacaccagtgggatctgctggacaaaggtggctccggccaccatcatcaccatcactaatga

SEQ ID NO: 4598 - protein, 211 aa, synthetic construct
  REGION 1..211: note = Variant of 3'O-kinase
MAVTIGLTGGIAAGKSTVSAMMRELGLPVIDADEAARAVMKPGEEAYRDIVLEFGPGILRADGEIDRQKLGAIRFSDEQQRKVLNSIVGPAVLKKMLAEWEAHIGSGAKTVVLDIPLLFESGLQSWMDKVLVVYVDDDVQLRRLMARNGFTEEEALKRIRSQWPSAEKVKRADAVIDNNGNIEETRRQLLDILHQWDLLDKGGSGHHHHHH

SEQ ID NO: 4599 - DNA, 639 bp, synthetic construct
  misc_feature 1..639: note = Variant of 3'O-kinase
  source 1..639: mol_type = other DNA
atggcggttaccattggtttaacaggagggatcgcagcgggcaaatcgactgtgagtgccatgatgcgtgaactgggtctgccggtcatcgatgctgacgaggcagcacgcgccgttatgaagccaggcgaagaagcgtatcgcgacattgtaacggaattcgggccgggcatccttcgtgcggatggcgagatcgatcgccagaaactgggtgctatccgcttttcggacgaacaacaacgtaaggtgctgaattcgattgtaggtcctgcagtcctgaagaagatgctcgcggagtgggaagctcatatcgggtcaggcgccaagacggttgtgctggatatcccgctgctgttcgaatccggattgcaatcgtggatggacaaagttctcgtggtgtacgtcgatgatgatgttcagttacgccgccttatggcacgtaacgggtttactgaagaagaagctctgaagcgcattcgttcacagtggcccagtgcggagaaagttaaacgtgcagacgctgtcatcgacaataatggcaatattgaagaaacccgccgccagctgctggacattttacaccagtgggatctgctggacaaaggtggctccggccaccatcatcaccatcactaatga

SEQ ID NO: 4600 - protein, 211 aa, synthetic construct
  REGION 1..211: note = Variant of 3'O-kinase
MAVTIGLTGGIAAGKSTVSAMMRELGLPVIDADEAARAVMKPGEEAYRDIVTEFGPGILRADGEIDRQKLGAIRFSDEQQRKVLNSIVGPAVLKKMLAEWEAHIGSGAKTVVLDIPLLFESGLQSWMDKVLVVYVDDDVQLRRLMARNGFTEEEALKRIRSQWPSAEKVKRADAVIDNNGNIEETRRQLLDILHQWDLLDKGGSGHHHHHH

SEQ ID NO: 4601 - DNA, 639 bp, synthetic construct
  misc_feature 1..639: note = Variant of 3'O-kinase
  source 1..639: mol_type = other DNA
atggcggttaccattggtttaacaggagggatcgcagttggcaaatcgactgtgagtgccatgatgcgtgaactgggtctgccggtcatcgatgctgacgaggcagcacgcgccgttatgaagccaggcgaagaagcgtatcgcgacattgtagctgaattcgggccgggcatccttcgtgcggatggcgagatcgatcgccagaaactgggtgctatccgcttttcggacgaacaacaacgtaaggtgctgaattcgattgtaggtcctgcagtcctgaagaagatgctcgcggagtgggaagctcatatcgggtcaggcgccaagacggttgtgctggatatcccgctgctgttcgaatccggattgcaatcgtggatggacaaagttctcgtggtgtacgtcgatgatgatgttcagttacgccgccttatggcacgtaacgggtttactgaagaagaagctctgaagcgcattcgttcacagtggcccagtgcggagaaagttaaacgtgcagacgctgtcatcgacaataatggcaatattgaagaaacccgccgccagctgctggacattttacaccagtgggatctgctggacaaaggtggctccggccaccatcatcaccatcactaatga

SEQ ID NO: 4602 - protein, 211 aa, synthetic construct
  REGION 1..211: note = Variant of 3'O-kinase
MAVTIGLTGGIAVGKSTVSAMMRELGLPVIDADEAARAVMKPGEEAYRDIVAEFGPGILRADGEIDRQKLGAIRFSDEQQRKVLNSIVGPAVLKKMLAEWEAHIGSGAKTVVLDIPLLFESGLQSWMDKVLVVYVDDDVQLRRLMARNGFTEEEALKRIRSQWPSAEKVKRADAVIDNNGNIEETRRQLLDILHQWDLLDKGGSGHHHHHH

SEQ ID NO: 4603 - DNA, 639 bp, synthetic construct
  misc_feature 1..639: note = Variant of 3'O-kinase
  source 1..639: mol_type = other DNA
atggcgagtaccattggtttaacaggagggatcgcagcgggcaaatcgactgtgagtgccatgatgcgtgaactgggtctgccggtcatcgatgctgacgaggcagcacgcgccgttatgaagccaggcgaagaagcgtatcgcgacattgtagctgaattcgggccgggcatccttcgtgcggatggcgagatcgatcgccagaaactgggtgctatccgcttttcggacgaacaacaacgtaaggtgctgaattcgattgtaggtcctgcagtcctgaagaagatgctcgcggagtgggaagctcatatcgggtcaggcgccaagacggttgtgctggatatcccgctgctgttcgaatccggattgcaatcgtggatggacaaagttctcgtggtgtacgtcgatgatgatgttcagttacgccgccttatggcacgtaacgggtttactgaagaagaagctctgaagcgcattcgttcacagtggcccagtgcggagaaagttaaacgtgcagacgctgtcatcgacaataatggcaatattgaagaaacccgccgccagctgctggacattttacaccagtgggatctgctggacaaaggtggctccggccaccatcatcaccatcactaatga

SEQ ID NO: 4604 - protein, 211 aa, synthetic construct
  REGION 1..211: note = Variant of 3'O-kinase
MASTIGLTGGIAAGKSTVSAMMRELGLPVIDADEAARAVMKPGEEAYRDIVAEFGPGILRADGEIDRQKLGAIRFSDEQQRKVLNSIVGPAVLKKMLAEWEAHIGSGAKTVVLDIPLLFESGLQSWMDKVLVVYVDDDVQLRRLMARNGFTEEEALKRIRSQWPSAEKVKRADAVIDNNGNIEETRRQLLDILHQWDLLDKGGSGHHHHHH

SEQ ID NO: 4605 - DNA, 639 bp, synthetic construct
  misc_feature 1..639: note = Variant of 3'O-kinase
  source 1..639: mol_type = other DNA
atggcggttaccattggtttaacaggagggatcgcagcgggcaaatcgactgtgagtgccatgatgcgtgaactgggtctgccggtcatcgatgctgacgaggcagcacgcgccgttatgaagccaggcgaagaagcgtatcgcgacattgtagctgaattcgggccgggcatccttcgtgcggatggcgagatcgatcgccagaaactgggtgctatccgcttttcggacgaacaacaacgtaaggtgctgaattcgattgtaggtcctgcagtcctgaagaagatgctcgcggagtgggaagctcatatcgggtcaggcgcctcgacggttgtgctggatatcccgctgctgttcgaatccggattgcaatcgtggatggacaaagttctcgtggtgtacgtcgatgatgatgttcagttacgccgccttatggcacgtaacgggtttactgaagaagaagctctgaagcgcattcgttcacagtggcccagtgcggagaaagttaaacgtgcagacgctgtcatcgacaataatggcaatattgaagaaacccgccgccagctgctggacattttacaccagtgggatctgctggacaaaggtggctccggccaccatcatcaccatcactaatga

SEQ ID NO: 4606 - protein, 211 aa, synthetic construct
  REGION 1..211: note = Variant of 3'O-kinase
MAVTIGLTGGIAAGKSTVSAMMRELGLPVIDADEAARAVMKPGEEAYRDIVAEFGPGILRADGEIDRQKLGAIRFSDEQQRKVLNSIVGPAVLKKMLAEWEAHIGSGASTVVLDIPLLFESGLQSWMDKVLVVYVDDDVQLRRLMARNGFTEEEALKRIRSQWPSAEKVKRADAVIDNNGNIEETRRQLLDILHQWDLLDKGGSGHHHHHH

SEQ ID NO: 4607 - DNA, 639 bp, synthetic construct
  misc_feature 1..639: note = Variant of 3'O-kinase
  source 1..639: mol_type = other DNA
atggcggttaccattggtttaacaggagggatcgcagcgggcaaatcgactgtgagtgccatgatgcgtgaactgggtctgccggtcatcgatgctgacgaggcagcacgcgccgttatgaagccaggcgaagaagcgtatcgcgacattgtagctgaattcgggccgggcatccttcgtgcggatggcgagatcgatcgccagaaactgggtgctatccgcttttcggacgaacaacaatggaaggtgctgaattcgattgtaggtcctgcagtcctgaagaagatgctcgcggagtgggaagctcatatcgggtcaggcgccaagacggttgtgctggatatcccgctgctgttcgaatccggattgcaatcgtggatggacaaagttctcgtggtgtacgtcgatgatgatgttcagttacgccgccttatggcacgtaacgggtttactgaagaagaagctctgaagcgcattcgttcacagtggcccagtgcggagaaagttaaacgtgcagacgctgtcatcgacaataatggcaatattgaagaaacccgccgccagctgctggacattttacaccagtgggatctgctggacaaaggtggctccggccaccatcatcaccatcactaatga

SEQ ID NO: 4608 - protein, 211 aa, synthetic construct
  REGION 1..211: note = Variant of 3'O-kinase
MAVTIGLTGGIAAGKSTVSAMMRELGLPVIDADEAARAVMKPGEEAYRDIVAEFGPGILRADGEIDRQKLGAIRFSDEQQWKVLNSIVGPAVLKKMLAEWEAHIGSGAKTVVLDIPLLFESGLQSWMDKVLVVYVDDDVQLRRLMARNGFTEEEALKRIRSQWPSAEKVKRADAVIDNNGNIEETRRQLLDILHQWDLLDKGGSGHHHHHH

SEQ ID NO: 4609 - DNA, 639 bp, synthetic construct
  misc_feature 1..639: note = Variant of 3'O-kinase
  source 1..639: mol_type = other DNA
atggcggttaccattggtttaacaggagggatcgcagcgggcaaatcgactgtgagtgccatgatgcgtgaactgggtctgccggtcatcgatgctgacgaggcagcacgcgccgttatgaagccaggcgaagaagcgtatcgcgacattgtagctgaattcgggccgggcatccttcgtgcggatggcgagatcgatcgccagaaactgggtgctatccgcttttcggacgaacaacaacgtaaggtgctgaattcgattgtaggtcctgcagtcctgaagaagatgctcgcggagtgggaagctcatatcgggtcaggcgccaagacggttgtgctggatatcccgctgctgttcgaatccggattgcaatcgtggatggacaaagttctcgtggtgtacgtcgatgatgatgttcagttacgccgccttatggcacgtaacgggtttactgaagaagaagctctgaagcgcattcgttcacagtggcccagtgcggagaaagttaaacgtgcagacgctgtcatcgacaataatggcaatattgaagaaacccgccgccagctgctggacattttacaccagtgggctctgctggacaaaggtggctccggccaccatcatcaccatcactaatga

SEQ ID NO: 4610 - protein, 211 aa, synthetic construct
  REGION 1..211: note = Variant of 3'O-kinase
MAVTIGLTGGIAAGKSTVSAMMRELGLPVIDADEAARAVMKPGEEAYRDIVAEFGPGILRADGEIDRQKLGAIRFSDEQQRKVLNSIVGPAVLKKMLAEWEAHIGSGAKTVVLDIPLLFESGLQSWMDKVLVVYVDDDVQLRRLMARNGFTEEEALKRIRSQWPSAEKVKRADAVIDNNGNIEETRRQLLDILHQWALLDKGGSGHHHHHH

SEQ ID NO: 4611 - DNA, 639 bp, synthetic construct
  misc_feature 1..639: note = Variant of 3'O-kinase
  source 1..639: mol_type = other DNA
atggcggttaccattggtttaacaggagggatcgcagcgggcaaatcgactgtgagtgccatgatgcgtgaactgggtctgccggtcatcgatgctgacgaggcagcacgcgccgttatgaagccaggcgaagaagcgtatcgcgacattgtagctgaattcgggccgggcatccttcgtgcggatggcgagatcgatcgccagaaactgggtgctatccgcttttcggacgaacaacaacgtaaggtgctgaattcgattgtaggtagggcagtcctgaagaagatgctcgcggagtgggaagctcatatcgggtcaggcgccaagacggttgtgctggatatcccgctgctgttcgaatccggattgcaatcgtggatggacaaagttctcgtggtgtacgtcgatgatgatgttcagttacgccgccttatggcacgtaacgggtttactgaagaagaagctctgaagcgcattcgttcacagtggcccagtgcggagaaagttaaacgtgcagacgctgtcatcgacaataatggcaatattgaagaaacccgccgccagctgctggacattttacaccagtgggatctgctggacaaaggtggctccggccaccatcatcaccatcactaatga

SEQ ID NO: 4612 - protein, 211 aa, synthetic construct
  REGION 1..211: note = Variant of 3'O-kinase
MAVTIGLTGGIAAGKSTVSAMMRELGLPVIDADEAARAVMKPGEEAYRDIVAEFGPGILRADGEIDRQKLGAIRFSDEQQRKVLNSIVGRAVLKKMLAEWEAHIGSGAKTVVLDIPLLFESGLQSWMDKVLVVYVDDDVQLRRLMARNGFTEEEALKRIRSQWPSAEKVKRADAVIDNNGNIEETRRQLLDILHQWDLLDKGGSGHHHHHH

SEQ ID NO: 4613 - DNA, 639 bp, synthetic construct
  misc_feature 1..639: note = Variant of 3'O-kinase
  source 1..639: mol_type = other DNA
atgcaggttaccattggtttaacaggagggatcgcagcgggcaaatcgactgtgagtgccatgatgcgtgaactgggtctgccggtcatcgatgctgacgaggcagcacgcgccgttatgaagccaggcgaagaagcgtatcgcgacattgtagctgaattcgggccgggcatccttcgtgcggatggcgagatcgatcgccagaaactgggtgctatccgcttttcggacgaacaacaacgtaaggtgctgaattcgattgtaggtcctgcagtcctgaagaagatgctcgcggagtgggaagctcatatcgggtcaggcgccaagacggttgtgctggatatcccgctgctgttcgaatccggattgcaatcgtggatggacaaagttctcgtggtgtacgtcgatgatgatgttcagttacgccgccttatggcacgtaacgggtttactgaagaagaagctctgaagcgcattcgttcacagtggcccagtgcggagaaagttaaacgtgcagacgctgtcatcgacaataatggcaatattgaagaaacccgccgccagctgctggacattttacaccagtgggatctgctggacaaaggtggctccggccaccatcatcaccatcactaatga

SEQ ID NO: 4614 - protein, 211 aa, synthetic construct
  REGION 1..211: note = Variant of 3'O-kinase
MQVTIGLTGGIAAGKSTVSAMMRELGLPVIDADEAARAVMKPGEEAYRDIVAEFGPGILRADGEIDRQKLGAIRFSDEQQRKVLNSIVGPAVLKKMLAEWEAHIGSGAKTVVLDIPLLFESGLQSWMDKVLVVYVDDDVQLRRLMARNGFTEEEALKRIRSQWPSAEKVKRADAVIDNNGNIEETRRQLLDILHQWDLLDKGGSGHHHHHH

SEQ ID NO: 4615 - DNA, 639 bp, synthetic construct
  misc_feature 1..639: note = Variant of 3'O-kinase
  source 1..639: mol_type = other DNA
atggcggttaccattggtttaacaggagggatcgcagcgggcaaatcgactgtgagtgccatgatgcgtgaactgggtctgccggtcatcgatgctgacgaggcagcacgcgccgttatgaagccaggcgaagaagcgtatcgcgacattgtagctgaattcgggccgggcatccttcgtgcggatggcgagatcgatcgccagaaactgggtgctatccgcttttcggacgaacaacaacgtaagctgctgaattcgattgtaggtcctgcagtcctgaagaagatgctcgcggagtgggaagctcatatcgggtcaggcgccaagacggttgtgctggatatcccgctgctgttcgaatccggattgcaatcgtggatggacaaagttctcgtggtgtacgtcgatgatgatgttcagttacgccgccttatggcacgtaacgggtttactgaagaagaagctctgaagcgcattcgttcacagtggcccagtgcggagaaagttaaacgtgcagacgctgtcatcgacaataatggcaatattgaagaaacccgccgccagctgctggacattttacaccagtgggatctgctggacaaaggtggctccggccaccatcatcaccatcactaatga

SEQ ID NO: 4616 - protein, 211 aa, synthetic construct
  REGION 1..211: note = Variant of 3'O-kinase
MAVTIGLTGGIAAGKSTVSAMMRELGLPVIDADEAARAVMKPGEEAYRDIVAEFGPGILRADGEIDRQKLGAIRFSDEQQRKLLNSIVGPAVLKKMLAEWEAHIGSGAKTVVLDIPLLFESGLQSWMDKVLVVYVDDDVQLRRLMARNGFTEEEALKRIRSQWPSAEKVKRADAVIDNNGNIEETRRQLLDILHQWDLLDKGGSGHHHHHH

SEQ ID NO: 4617 - DNA, 639 bp, synthetic construct
  misc_feature 1..639: note = Variant of 3'O-kinase
  source 1..639: mol_type = other DNA
atggcggttaccattggtttaacaggagggatcgcagcgggcaaatcgactgtgagtgccatgatgcgtgaactgggtctgccggtcatcgatgctgacgaggcagcacgcgccgttatgaagccaggcgaagaagcgtatcgcgacattgtagctgaaatggggccgggcatccttcgtgcggatggcgagatcgatcgccagaaactgggtgctatccgcttttcggacgaacaacaacgtaaggtgctgaattcgattgtaggtcctgcagtcctgaagaagatgctcgcggagtgggaagctcatatcgggtcaggcgccaagacggttgtgctggatatcccgctgctgttcgaatccggattgcaatcgtggatggacaaagttctcgtggtgtacgtcgatgatgatgttcagttacgccgccttatggcacgtaacgggtttactgaagaagaagctctgaagcgcattcgttcacagtggcccagtgcggagaaagttaaacgtgcagacgctgtcatcgacaataatggcaatattgaagaaacccgccgccagctgctggacattttacaccagtgggatctgctggacaaaggtggctccggccaccatcatcaccatcactaatga

SEQ ID NO: 4618 - protein, 211 aa, synthetic construct
  REGION 1..211: note = Variant of 3'O-kinase
MAVTIGLTGGIAAGKSTVSAMMRELGLPVIDADEAARAVMKPGEEAYRDIVAEMGPGILRADGEIDRQKLGAIRFSDEQQRKVLNSIVGPAVLKKMLAEWEAHIGSGAKTVVLDIPLLFESGLQSWMDKVLVVYVDDDVQLRRLMARNGFTEEEALKRIRSQWPSAEKVKRADAVIDNNGNIEETRRQLLDILHQWDLLDKGGSGHHHHHH

SEQ ID NO: 4619 - DNA, 639 bp, synthetic construct
  misc_feature 1..639: note = Variant of 3'O-kinase
  source 1..639: mol_type = other DNA
atggcggttaccattggtttaacaggagggatcgcagcgggcaaatcgactgtgagtgccatgatgcgtgaactgggtctgccggtcatcgatgctgacgaggcagcacgcgccgttatgaagccagaggaagaagcgtatcgcgacattgtagctgaattcgggccgggcatccttcgtgcggatggcgagatcgatcgccagaaactgggtgctatccgcttttcggacgaacaacaacgtaaggtgctgaattcgattgtaggtcctgcagtcctgaagaagatgctcgcggagtgggaagctcatatcgggtcaggcgccaagacggttgtgctggatatcccgctgctgttcgaatccggattgcaatcgtggatggacaaagttctcgtggtgtacgtcgatgatgatgttcagttacgccgccttatggcacgtaacgggtttactgaagaagaagctctgaagcgcattcgttcacagtggcccagtgcggagaaagttaaacgtgcagacgctgtcatcgacaataatggcaatattgaagaaacccgccgccagctgctggacattttacaccagtgggatctgctggacaaaggtggctccggccaccatcatcaccatcactaatga

SEQ ID NO: 4620 - protein, 211 aa, synthetic construct
  REGION 1..211: note = Variant of 3'O-kinase
MAVTIGLTGGIAAGKSTVSAMMRELGLPVIDADEAARAVMKPEEEAYRDIVAEFGPGILRADGEIDRQKLGAIRFSDEQQRKVLNSIVGPAVLKKMLAEWEAHIGSGAKTVVLDIPLLFESGLQSWMDKVLVVYVDDDVQLRRLMARNGFTEEEALKRIRSQWPSAEKVKRADAVIDNNGNIEETRRQLLDILHQWDLLDKGGSGHHHHHH

SEQ ID NO: 4621 - DNA, 639 bp, synthetic construct
  misc_feature 1..639: note = Variant of 3'O-kinase
  source 1..639: mol_type = other DNA
atggcggttaccattggtttaacaggagggatcgcagcgggcaaatcgactgtgagtgccatgatgcgtgaactgggtctgccggtcatcgatgctgacgaggcagcacgcgccgttcgtaagccaggcgaagaagcgtatcgcgacattgtagctgaattcgggccgggcatccttcgtgcggatggcgagatcgatcgccagaaactgggtgctatccgcttttcggacgaacaacaacgtaaggtgctgaattcgattgtaggtcctgcagtcctgaagaagatgctcgcggagtgggaagctcatatcgggtcaggcgccaagacggttgtgctggatatcccgctgctgttcgaatccggattgcaatcgtggatggacaaagttctcgtggtgtacgtcgatgatgatgttcagttacgccgccttatggcacgtaacgggtttactgaagaagaagctctgaagcgcattcgttcacagtggcccagtgcggagaaagttaaacgtgcagacgctgtcatcgacaataatggcaatattgaagaaacccgccgccagctgctggacattttacaccagtgggatctgctggacaaaggtggctccggccaccatcatcaccatcactaatga

SEQ ID NO: 4622 - protein, 211 aa, synthetic construct
  REGION 1..211: note = Variant of 3'O-kinase
MAVTIGLTGGIAAGKSTVSAMMRELGLPVIDADEAARAVRKPGEEAYRDIVAEFGPGILRADGEIDRQKLGAIRFSDEQQRKVLNSIVGPAVLKKMLAEWEAHIGSGAKTVVLDIPLLFESGLQSWMDKVLVVYVDDDVQLRRLMARNGFTEEEALKRIRSQWPSAEKVKRADAVIDNNGNIEETRRQLLDILHQWDLLDKGGSGHHHHHH

SEQ ID NO: 4623 - DNA, 639 bp, synthetic construct
  misc_feature 1..639: note = Variant of 3'O-kinase
  source 1..639: mol_type = other DNA
atggcggttaccattggtttaacaggagggatcgcagcgggcaaatcgactgtgagtgccatgatgcgtgaactgggtctgccggtcatcgatgctgacgaggcagcacgcgccgttatgaagccaggcgaagaagcgtatcgcgacattgtagctgaattcgggccgggcatccttcgtgcggatggcgagatcgatcgccagaaactgggtgctatccgcttttcggacgaacaacaacgtaaggtgctgaattcgattgtaggtcctgcagtcctgaagaagatgctcgcggagtgggaagctcatatcgggtcaggcgccaagacggttgtgctggatatcccgctgctgttcgaatccggattgcaatcgtggatggacaaagttctcgtggtgtacgtcgatgatgatgttcagttacgccgccttatggcacgtaacgggtttactgaagaagaagctctgaagcgcattcgttcacagtggcccagtgcggagaaagttaaacgtgcagcggctgtcatcgacaataatggcaatattgaagaaacccgccgccagctgctggacattttacaccagtgggatctgctggacaaaggtggctccggccaccatcatcaccatcactaatga

SEQ ID NO: 4624 - protein, 211 aa, synthetic construct
  REGION 1..211: note = Variant of 3'O-kinase
MAVTIGLTGGIAAGKSTVSAMMRELGLPVIDADEAARAVMKPGEEAYRDIVAEFGPGILRADGEIDRQKLGAIRFSDEQQRKVLNSIVGPAVLKKMLAEWEAHIGSGAKTVVLDIPLLFESGLQSWMDKVLVVYVDDDVQLRRLMARNGFTEEEALKRIRSQWPSAEKVKRAAAVIDNNGNIEETRRQLLDILHQWDLLDKGGSGHHHHHH

SEQ ID NO: 4625 - DNA, 639 bp, synthetic construct
  misc_feature 1..639: note = Variant of 3'O-kinase
  source 1..639: mol_type = other DNA
atggcggttaccattggtttaacaggagggatcgcagcgggcaaatcgactgtgagtgccatgatgcgtgaactgggtctgccggtcatcgatgctgacgaggcagagcgcgccgttatgaagccaggcgaagaagcgtatcgcgacattgtagctgaattcgggccgggcatccttcgtgcggatggcgagatcgatcgccagaaactgggtgctatccgcttttcggacgaacaacaacgtaaggtgctgaattcgattgtaggtcctgcagtcctgaagaagatgctcgcggagtgggaagctcatatcgggtcaggcgccaagacggttgtgctggatatcccgctgctgttcgaatccggattgcaatcgtggatggacaaagttctcgtggtgtacgtcgatgatgatgttcagttacgccgccttatggcacgtaacgggtttactgaagaagaagctctgaagcgcattcgttcacagtggcccagtgcggagaaagttaaacgtgcagacgctgtcatcgacaataatggcaatattgaagaaacccgccgccagctgctggacattttacaccagtgggatctgctggacaaaggtggctccggccaccatcatcaccatcactaatga

SEQ ID NO: 4626 - protein, 211 aa, synthetic construct
  REGION 1..211: note = Variant of 3'O-kinase
MAVTIGLTGGIAAGKSTVSAMMRELGLPVIDADEAERAVMKPGEEAYRDIVAEFGPGILRADGEIDRQKLGAIRFSDEQQRKVLNSIVGPAVLKKMLAEWEAHIGSGAKTVVLDIPLLFESGLQSWMDKVLVVYVDDDVQLRRLMARNGFTEEEALKRIRSQWPSAEKVKRADAVIDNNGNIEETRRQLLDILHQWDLLDKGGSGHHHHHH

SEQ ID NO: 4627 - DNA, 639 bp, synthetic construct
  misc_feature 1..639: note = Variant of 3'O-kinase
  source 1..639: mol_type = other DNA
atggcggttaccattggtttaacaggagggatcgcagcgggcaaatcgactgtgagtgccatgatgcgtgaactgggtctgccggtcatcgatgctgacgaggcagcacgcgccgttatgaagccaggcgaagaagcgtatcgcgacattgtagctgaattcgggccgggcatccttcgtgcggatggcgagatcgatcgccagaaactgggtgctatccgcttttcggacgaacaacaacgtaaggtgctgcggtcgattgtaggtcctgcagtcctgaagaagatgctcgcggagtgggaagctcatatcgggtcaggcgccaagacggttgtgctggatatcccgctgctgttcgaatccggattgcaatcgtggatggacaaagttctcgtggtgtacgtcgatgatgatgttcagttacgccgccttatggcacgtaacgggtttactgaagaagaagctctgaagcgcattcgttcacagtggcccagtgcggagaaagttaaacgtgcagacgctgtcatcgacaataatggcaatattgaagaaacccgccgccagctgctggacattttacaccagtgggatctgctggacaaaggtggctccggccaccatcatcaccatcactaatga

SEQ ID NO: 4628 - protein, 211 aa, synthetic construct
  REGION 1..211: note = Variant of 3'O-kinase
MAVTIGLTGGIAAGKSTVSAMMRELGLPVIDADEAARAVMKPGEEAYRDIVAEFGPGILRADGEIDRQKLGAIRFSDEQQRKVLRSIVGPAVLKKMLAEWEAHIGSGAKTVVLDIPLLFESGLQSWMDKVLVVYVDDDVQLRRLMARNGFTEEEALKRIRSQWPSAEKVKRADAVIDNNGNIEETRRQLLDILHQWDLLDKGGSGHHHHHH

SEQ ID NO: 4629 - DNA, 639 bp, synthetic construct
  misc_feature 1..639: note = Variant of 3'O-kinase
  source 1..639: mol_type = other DNA
atggcggttaccattggtttaacaggagggatcgcagcgggcaaatcgactgtgagtgccatgatgcgtgaactgggtctgccggtcatcgatgctgacgaggcagcacgcgccgttatgaagccaggcgaagaagcgtatgtggacattgtagctgaattcgggccgggcatccttcgtgcggatggcgagatcgatcgccagaaactgggtgctatccgcttttcggacgaacaacaacgtaaggtgctgaattcgattgtaggtcctgcagtcctgaagaagatgctcgcggagtgggaagctcatatcgggtcaggcgccaagacggttgtgctggatatcccgctgctgttcgaatccggattgcaatcgtggatggacaaagttctcgtggtgtacgtcgatgatgatgttcagttacgccgccttatggcacgtaacgggtttactgaagaagaagctctgaagcgcattcgttcacagtggcccagtgcggagaaagttaaacgtgcagacgctgtcatcgacaataatggcaatattgaagaaacccgccgccagctgctggacattttacaccagtgggatctgctggacaaaggtggctccggccaccatcatcaccatcactaatga

SEQ ID NO: 4630 - protein, 211 aa, synthetic construct
  REGION 1..211: note = Variant of 3'O-kinase
MAVTIGLTGGIAAGKSTVSAMMRELGLPVIDADEAARAVMKPGEEAYVDIVAEFGPGILRADGEIDRQKLGAIRFSDEQQRKVLNSIVGPAVLKKMLAEWEAHIGSGAKTVVLDIPLLFESGLQSWMDKVLVVYVDDDVQLRRLMARNGFTEEEALKRIRSQWPSAEKVKRADAVIDNNGNIEETRRQLLDILHQWDLLDKGGSGHHHHHH

SEQ ID NO: 4631 - DNA, 639 bp, synthetic construct
  misc_feature 1..639: note = Variant of 3'O-kinase
  source 1..639: mol_type = other DNA
atggcggttaccattggtttaacaggagggatcgcagcgggcaaatcgactgtgagtgccatgatgcgtgaactgggtctgccggtcatcgatgctgacgaggcagcacgcgccgttatgaagccaggcgaagaagcgtatcgcgacattgtagctgaattcgggccgggcatccttcgtgcggatggcgagatcgatcgccagaaactgggtgctatccgcttttcggacgaacaacaacgtaaggtgctgaattcgattgtaggtcctgcagtcctgaagaagatgctcgcggagtgggaagctcatatcgggtcaggcgccaagacggttgtgctggatatcccgctgctgttcgaatccggattgcaatcgtggatggacaaagttctcgtggtgtacgtcgatgatgatgttcagttacgccgccttatggcacgtaacgggtttactgaagaagaagctctgaagcgcattcgttcacagtggcccagtgcggagaaagttaaacgtgcaattgctgtcatcgacaataatggcaatattgaagaaacccgccgccagctgctggacattttacaccagtgggatctgctggacaaaggtggctccggccaccatcatcaccatcactaatga

SEQ ID NO: 4632 - protein, 211 aa, synthetic construct
  REGION 1..211: note = Variant of 3'O-kinase
MAVTIGLTGGIAAGKSTVSAMMRELGLPVIDADEAARAVMKPGEEAYRDIVAEFGPGILRADGEIDRQKLGAIRFSDEQQRKVLNSIVGPAVLKKMLAEWEAHIGSGAKTVVLDIPLLFESGLQSWMDKVLVVYVDDDVQLRRLMARNGFTEEEALKRIRSQWPSAEKVKRAIAVIDNNGNIEETRRQLLDILHQWDLLDKGGSGHHHHHH

SEQ ID NO: 4633 - DNA, 639 bp, synthetic construct
  misc_feature 1..639: note = Variant of 3'O-kinase
  source 1..639: mol_type = other DNA
atggcggttaccattggtttaacaggagggatcgcagcgggcaaatcgactgtgagtgccatgatgcgtgaactgggtctgccggtcatcgatgctgacgaggcagcacgcgccgttatgaagccaggcgaagaagcgtatcgcgacattgtagctgggttcgggccgggcatccttcgtgcggatggcgagatcgatcgccagaaactgggtgctatccgcttttcggacgaacaacaacgtaaggtgctgaattcgattgtaggtcctgcagtcctgaagaagatgctcgcggagtgggaagctcatatcgggtcaggcgccaagacggttgtgctggatatcccgctgctgttcgaatccggattgcaatcgtggatggacaaagttctcgtggtgtacgtcgatgatgatgttcagttacgccgccttatggcacgtaacgggtttactgaagaagaagctctgaagcgcattcgttcacagtggcccagtgcggagaaagttaaacgtgcagacgctgtcatcgacaataatggcaatattgaagaaacccgccgccagctgctggacattttacaccagtgggatctgctggacaaaggtggctccggccaccatcatcaccatcactaatga

SEQ ID NO: 4634 - protein, 211 aa, synthetic construct
  REGION 1..211: note = Variant of 3'O-kinase
MAVTIGLTGGIAAGKSTVSAMMRELGLPVIDADEAARAVMKPGEEAYRDIVAGFGPGILRADGEIDRQKLGAIRFSDEQQRKVLNSIVGPAVLKKMLAEWEAHIGSGAKTVVLDIPLLFESGLQSWMDKVLVVYVDDDVQLRRLMARNGFTEEEALKRIRSQWPSAEKVKRADAVIDNNGNIEETRRQLLDILHQWDLLDKGGSGHHHHHH

SEQ ID NO: 4635 - DNA, 639 bp, synthetic construct
  misc_feature 1..639: note = Variant of 3'O-kinase
  source 1..639: mol_type = other DNA
atggcggggaccattggtttaacaggagggatcgcagcgggcaaatcgactgtgagtgccatgatgcgtgaactgggtctgccggtcatcgatgctgacgaggcagcacgcgccgttatgaagccaggcgaagaagcgtatcgcgacattgtagctgaattcgggccgggcatccttcgtgcggatggcgagatcgatcgccagaaactgggtgctatccgcttttcggacgaacaacaacgtaaggtgctgaattcgattgtaggtcctgcagtcctgaagaagatgctcgcggagtgggaagctcatatcgggtcaggcgccaagacggttgtgctggatattccgctgctgttcgaatccggattgcaatcgtggatggacaaagttctcgtggtgtacgtcgatgatgatgttcagttacgccgccttatggcacgtaacgggtttactgaagaagaagctctgaagcgcattcgttcacagtggcccagtgcggagaaagttaaacgtgcagacgctgtcatcgacaataatggcaatattgaagaaacccgccgccagctgctggacattttacaccagtgggatctgctggacaaaggtggctccggccaccatcatcaccatcactaatga

SEQ ID NO: 4636 - protein, 211 aa, synthetic construct
  REGION 1..211: note = Variant of 3'O-kinase
MAGTIGLTGGIAAGKSTVSAMMRELGLPVIDADEAARAVMKPGEEAYRDIVAEFGPGILRADGEIDRQKLGAIRFSDEQQRKVLNSIVGPAVLKKMLAEWEAHIGSGAKTVVLDIPLLFESGLQSWMDKVLVVYVDDDVQLRRLMARNGFTEEEALKRIRSQWPSAEKVKRADAVIDNNGNIEETRRQLLDILHQWDLLDKGGSGHHHHHH

SEQ ID NO: 4637 - DNA, 639 bp, synthetic construct
  misc_feature 1..639: note = Variant of 3'O-kinase
  source 1..639: mol_type = other DNA
atgctggttaccattggtttaacaggagggatcgcagcgggcaaatcgactgtgagtgccatgatgcgtgaactgggtctgccggtcatcgatgctgacgaggcagcacgcgccgttatgaagccaggcgaagaagcgtatcgcgacattgtagctgaattcgggccgggcatccttcgtgcggatggcgagatcgatcgccagaaactgggtgctatccgcttttcggacgaacaacaacgtaaggtgctgaattcgattgtaggtcctgcagtcctgaagaagatgctcgcggagtgggaagctcatatcgggtcaggcgccaagacggttgtgctggatatcccgctgctgttcgaatccggattgcaatcgtggatggacaaagttctcgtggtgtacgtcgatgatgatgttcagttacgccgccttatggcacgtaacgggtttactgaagaagaagctctgaagcgcattcgttcacagtggcccagtgcggagaaagttaaacgtgcagacgctgtcatcgacaataatggcaatattgaagaaacccgccgccagctgctggacattttacaccagtgggatctgctggacaaaggtggctccggccaccatcatcaccatcactaatga

SEQ ID NO: 4638 - protein, 211 aa, synthetic construct
  REGION 1..211: note = Variant of 3'O-kinase
MLVTIGLTGGIAAGKSTVSAMMRELGLPVIDADEAARAVMKPGEEAYRDIVAEFGPGILRADGEIDRQKLGAIRFSDEQQRKVLNSIVGPAVLKKMLAEWEAHIGSGAKTVVLDIPLLFESGLQSWMDKVLVVYVDDDVQLRRLMARNGFTEEEALKRIRSQWPSAEKVKRADAVIDNNGNIEETRRQLLDILHQWDLLDKGGSGHHHHHH

SEQ ID NO: 4639 - DNA, 639 bp, synthetic construct
  misc_feature 1..639: note = Variant of 3'O-kinase
  source 1..639: mol_type = other DNA
atggcggttaccattggtttaacaggagggatcgcagcgggcaaatcgactgtgagtgccatgatgcgtgaactgggtctgccggtcatcgatgctgacgaggcagcacgcgccgttatgaagccaggcgaagaagcgtatcgcgacattgtagctgaattcgggccgaagatccttcgtgcggatggcgagatcgatcgccagaaactgggtgctatccgcttttcggacgaacaacaacgtaaggtgctgaattcgattgtaggtcctgcagtcctgaagaagatgctcgcggagtgggaagctcatatcgggtcaggcgccaagacggttgtgctggatatcccgctgctgttcgaatccggattgcaatcgtggatggacaaagttctcgtggtgtacgtcgatgatgatgttcagttacgccgccttatggcacgtaacgggtttactgaagaagaagctctgaagcgcattcgttcacagtggcccagtgcggagaaagttaaacgtgcagacgctgtcatcgacaataatggcaatattgaagaaacccgccgccagctgctggacattttacaccagtgggatctgctggacaaaggtggctccggccaccatcatcaccatcactaatga

SEQ ID NO: 4640 - protein, 211 aa, synthetic construct
  REGION 1..211: note = Variant of 3'O-kinase
MAVTIGLTGGIAAGKSTVSAMMRELGLPVIDADEAARAVMKPGEEAYRDIVAEFGPKILRADGEIDRQKLGAIRFSDEQQRKVLNSIVGPAVLKKMLAEWEAHIGSGAKTVVLDIPLLFESGLQSWMDKVLVVYVDDDVQLRRLMARNGFTEEEALKRIRSQWPSAEKVKRADAVIDNNGNIEETRRQLLDILHQWDLLDKGGSGHHHHHH

SEQ ID NO: 4641 - DNA, 639 bp, synthetic construct
  misc_feature 1..639: note = Variant of 3'O-kinase
  source 1..639: mol_type = other DNA
atggcggttaccattggtttaacaggagggatcgcagcgggcaaatcgactgtgagtgccatgatgcgtgaactgggtctgccggtcatcgatgctgacgaggcagcacgcgccgttatgaagccaggcgaagaagcgtatcgcgacattgtagctgaattcgggccgggcatccttcgtgcggatggcgagatcgatcgccagaaactgggtgctatccgcttttcggacgaacaacaacgtaaggtgctgatgtcgattgtaggtcctgcagtcctgaagaagatgctcgcggagtgggaagctcatatcgggtcaggcgccaagacggttgtgctggatatcccgctgctgttcgaatccggattgcaatcgtggatggacaaagttctcgtggtgtacgtcgatgatgatgttcagttacgccgccttatggcacgtaacgggtttactgaagaagaagctctgaagcgcattcgttcacagtggcccagtgcggagaaagttaaacgtgcagacgctgtcatcgacaataatggcaatattgaagaaacccgccgccagctgctggacattttacaccagtgggatctgctggacaaaggtggctccggccaccatcatcaccatcactaatga

SEQ ID NO: 4642 - protein, 211 aa, synthetic construct
  REGION 1..211: note = Variant of 3'O-kinase
MAVTIGLTGGIAAGKSTVSAMMRELGLPVIDADEAARAVMKPGEEAYRDIVAEFGPGILRADGEIDRQKLGAIRFSDEQQRKVLMSIVGPAVLKKMLAEWEAHIGSGAKTVVLDIPLLFESGLQSWMDKVLVVYVDDDVQLRRLMARNGFTEEEALKRIRSQWPSAEKVKRADAVIDNNGNIEETRRQLLDILHQWDLLDKGGSGHHHHHH

SEQ ID NO: 4643 - DNA, 639 bp, synthetic construct
  misc_feature 1..639: note = Variant of 3'O-kinase
  source 1..639: mol_type = other DNA
atggcggttaccattggtttaacaggagggatcgcagcgggcaaatcgactgtgagtgccatgatgcgtgaactgggtctgccggtcatcgatgctgacgaggcagcacgcgccgttatgaagccaggcgaagaagcgtatcgcgacattgtagctgaattcgggccggttatccttcgtgcggatggcgagatcgatcgccagaaactgggtgctatccgcttttcggacgaacaacaacgtaaggtgctgaattcgattgtaggtcctgcagtcctgaagaagatgctcgcggagtgggaagctcatatcgggtcaggcgccaagacggttgtgctggatatcccgctgctgttcgaatccggattgcaatcgtggatggacaaagttctcgtggtgtacgtcgatgatgatgttcagttacgccgccttatggcacgtaacgggtttactgaagaagaagctctgaagcgcattcgttcacagtggcccagtgcggagaaagttaaacgtgcagacgctgtcatcgacaataatggcaatattgaagaaacccgccgccagctgctggacattttacaccagtgggatctgctggacaaaggtggctccggccaccatcatcaccatcactaatga

SEQ ID NO: 4644 - protein, 211 aa, synthetic construct
  REGION 1..211: note = Variant of 3'O-kinase
MAVTIGLTGGIAAGKSTVSAMMRELGLPVIDADEAARAVMKPGEEAYRDIVAEFGPVILRADGEIDRQKLGAIRFSDEQQRKVLNSIVGPAVLKKMLAEWEAHIGSGAKTVVLDIPLLFESGLQSWMDKVLVVYVDDDVQLRRLMARNGFTEEEALKRIRSQWPSAEKVKRADAVIDNNGNIEETRRQLLDILHQWDLLDKGGSGHHHHHH

SEQ ID NO: 4645 - DNA, 639 bp, synthetic construct
  misc_feature 1..639: note = Variant of 3'O-kinase
  source 1..639: mol_type = other DNA
atggcggttaccattggtttaacaggagggatcgcagcgggcaaatcgactgtgagtgccatgatgcgtgaactgggtctgccggtcatcgatgctgacgaggcagcacgcgccgttatgaagccaggcgaagaagcgtatcgcgacattgtagctgaattcgggccgggcatccttcgtgcggatggcgagatcgatcgccagaaactgggtgctatccgcttttcggacgaacaacaacgtaaggtgctgaattcgattgtaggtcctgcagtcctgaagaagatgctcgcggagtgggaagctcatatcgggtcaggcgccaagacggttgtgctggatatcccgctgctgttcgaatccggattgcaatcgtggatggacccggttctcgtggtgtacgtcgatgatgatgttcagttacgccgccttatggcacgtaacgggtttactgaagaagaagctctgaagcgcattcgttcacagtggcccagtgcggagaaagttaaacgtgcagacgctgtcatcgacaataatggcaatattgaagaaacccgccgccagctgctggacattttacaccagtgggatctgctggacaaaggtggctccggccaccatcatcaccatcactaatga

SEQ ID NO: 4646 - protein, 211 aa, synthetic construct
  REGION 1..211: note = Variant of 3'O-kinase
MAVTIGLTGGIAAGKSTVSAMMRELGLPVIDADEAARAVMKPGEEAYRDIVAEFGPGILRADGEIDRQKLGAIRFSDEQQRKVLNSIVGPAVLKKMLAEWEAHIGSGAKTVVLDIPLLFESGLQSWMDPVLVVYVDDDVQLRRLMARNGFTEEEALKRIRSQWPSAEKVKRADAVIDNNGNIEETRRQLLDILHQWDLLDKGGSGHHHHHH

SEQ ID NO: 4647 - DNA, 639 bp, synthetic construct
  misc_feature 1..639: note = Variant of 3'O-kinase
  source 1..639: mol_type = other DNA
atggcggttaccattggtttaacaggagggatcgcagcgggcaaatcgactgtgagtgccatgatgcgtgaactgggtctgccggtcatcgatgctgacgaggcagcacgcgccgttatgaagccaggcgaagaagcgtatcgcgacattgtagctgaattcgggccgggcatccttcgtgcggatggcgagatcgatcgccagaaactgggtgctatccgcttttcggacggtcaacaacgtaaggtgctgaattcgattgtaggtcctgcagtcctgaagaagatgctcgcggagtgggaagctcatatcgggtcaggcgccaagacggttgtgctggatatcccgctgctgttcgaatccggattgcaatcgtggatggacaaagttctcgtggtgtacgtcgatgatgatgttcagttacgccgccttatggcacgtaacgggtttactgaagaagaagctctgaagcgcattcgttcacagtggcccagtgcggagaaagttaaacgtgcagacgctgtcatcgacaataatggcaatattgaagaaacccgccgccagctgctggacattttacaccagtgggatctgctggacaaaggtggctccggccaccatcatcaccatcactaatga

SEQ ID NO: 4648 - protein, 211 aa, synthetic construct
  REGION 1..211: note = Variant of 3'O-kinase
MAVTIGLTGGIAAGKSTVSAMMRELGLPVIDADEAARAVMKPGEEAYRDIVAEFGPGILRADGEIDRQKLGAIRFSDGQQRKVLNSIVGPAVLKKMLAEWEAHIGSGAKTVVLDIPLLFESGLQSWMDKVLVVYVDDDVQLRRLMARNGFTEEEALKRIRSQWPSAEKVKRADAVIDNNGNIEETRRQLLDILHQWDLLDKGGSGHHHHHH

SEQ ID NO: 4649 - DNA, 639 bp, synthetic construct
  misc_feature 1..639: note = Variant of 3'O-kinase
  source 1..639: mol_type = other DNA
atggcggttaccattggtttaacaggagggatcgcagcgggcaaatcgactgtgagtgccatgatgcgtgaactgggtctgccggtcatcgatgctgacgaggcagcacgcgccgttatgaagccaggcgaagaagcgtatcgcgacattgtagctgaattcgggccgggcatccttcgtgcggatggcgagatcgatcgccagaaactgggtgctatccgcttttcggacgaacaacaacgtaaggtgctgaattcgattgtaggtcctgcagtcctgaagaagatgctcgcggagtgggaagctcatatcgggtcaggcgccaagacggttgtgctggatatcccgctgctgttcgaatccggattgcaatcgtggatggacaaagttctcgtggtgtacgtcgatgatgatgttcagttacgccgccttatggcacgtaacgggtttactgaagaaacggctctgaagcgcattcgttcacagtggcccagtgcggagaaagttaaacgtgcagacgctgtcatcgacaataatggcaatattgaagaaacccgccgccagctgctggacattttacaccagtgggatctgctggacaaaggtggctccggccaccatcatcaccatcactaatga

SEQ ID NO: 4650 - protein, 211 aa, synthetic construct
  REGION 1..211: note = Variant of 3'O-kinase
MAVTIGLTGGIAAGKSTVSAMMRELGLPVIDADEAARAVMKPGEEAYRDIVAEFGPGILRADGEIDRQKLGAIRFSDEQQRKVLNSIVGPAVLKKMLAEWEAHIGSGAKTVVLDIPLLFESGLQSWMDKVLVVYVDDDVQLRRLMARNGFTEETALKRIRSQWPSAEKVKRADAVIDNNGNIEETRRQLLDILHQWDLLDKGGSGHHHHHH

SEQ ID NO: 4651 - DNA, 639 bp, synthetic construct
  misc_feature 1..639: note = Variant of 3'O-kinase
  source 1..639: mol_type = other DNA
atggcggttaccattggtttaacaggagggatcgcagcgggcaaatcgactgtgagtgccatgatgcgtgaactgggtctgccggtcatcgatgctgacgaggcagcacgcgccgttatgaagccaggcgaagaagcgtatcgcgacattgtagctgaattcgggccgggcatccttcgtgcggatggcgagatcgatcgccagaaactgggtgctatccgcttttcggacgaacaacaacgtaaggtgctgaattcgattgtaggtcctgcagtcctgaagaagatgctcgcggagtgggaagctcatatcgggtcaggcgccaagacggttgtgctggatatcccgctgctgttcgaatccggattgcaatcgtggatggacaaagttctcgtggtgtacgtcgatgatgatgttcagttacgccgccttatggcacgtaacgggtttactgaagaagaagctctgaagcgcattcgttcacagtggcccagtgcggagaaagttaaacgtgcagacgctgtcatcgacaataatggcaatattgaagaaaccgcgcgccagctgctggacattttacaccagtgggatctgctggacaaaggtggctccggccaccatcatcaccatcactaatga

SEQ ID NO: 4652 - protein, 211 aa, synthetic construct
  REGION 1..211: note = Variant of 3'O-kinase
MAVTIGLTGGIAAGKSTVSAMMRELGLPVIDADEAARAVMKPGEEAYRDIVAEFGPGILRADGEIDRQKLGAIRFSDEQQRKVLNSIVGPAVLKKMLAEWEAHIGSGAKTVVLDIPLLFESGLQSWMDKVLVVYVDDDVQLRRLMARNGFTEEEALKRIRSQWPSAEKVKRADAVIDNNGNIEETARQLLDILHQWDLLDKGGSGHHHHHH

SEQ ID NO: 4653 - DNA, 639 bp, synthetic construct
  misc_feature 1..639: note = Variant of 3'O-kinase
  source 1..639: mol_type = other DNA
atggcggttaccattggtttaacaggagggatcgcagcgggcaaatcgactgtgagtgccatgatgcgtgaactgggtctgccggtcatcgatgctgacgaggcagcacgcgccgttatgaagccaggcgaagaagcgtatcgcgacattgtagctgaattcgggccgggcatccttcgtgcggatggcgagatcgatcgccagaaactgggtgctatccgcttttcggacgaacaacaacgtaagcagctgaattcgattgtaggtcctgcagtcctgaagaagatgctcgcggagtgggaagctcatatcgggtcaggcgccaagacggttgtgctggatatcccgctgctgttcgaatccggattgcaatcgtggatggacaaagttctcgtggtgtacgtcgatgatgatgttcagttacgccgccttatggcacgtaacgggtttactgaagaagaagctctgaagcgcattcgttcacagtggcccagtgcggagaaagttaaacgtgcagacgctgtcatcgacaataatggcaatattgaagaaacccgccgccagctgctggacattttacaccagtgggatctgctggacaaaggtggctccggccaccatcatcaccatcactaatga

SEQ ID NO: 4654 - protein, 211 aa, synthetic construct
  REGION 1..211: note = Variant of 3'O-kinase
MAVTIGLTGGIAAGKSTVSAMMRELGLPVIDADEAARAVMKPGEEAYRDIVAEFGPGILRADGEIDRQKLGAIRFSDEQQRKQLNSIVGPAVLKKMLAEWEAHIGSGAKTVVLDIPLLFESGLQSWMDKVLVVYVDDDVQLRRLMARNGFTEEEALKRIRSQWPSAEKVKRADAVIDNNGNIEETRRQLLDILHQWDLLDKGGSGHHHHHH

SEQ ID NO: 4655 - DNA, 639 bp, synthetic construct
  misc_feature 1..639: note = Variant of 3'O-kinase
  source 1..639: mol_type = other DNA
atggcggttaccattggtttaacaggagggatcgcagcgggcaaatcgactgtgagtgccatgatgcgtgaactgggtctgccggtcatcgatgctgacgaggcagcacgcgccgttatgaagccaggcgaagaagcgtatcgcgacattgtagctgaattcgggccgggcatccttcgtgcggatggcgagatcgatcgccagaaactgggtgctatccgcttttcggacgaacaacaacgtaaggtgctgaattcgattgtaggtcctgcagtcctgaagaagatgacggcggagtgggaagctcatatcgggtcaggcgccaagacggttgtgctggatatcccgctgctgttcgaatccggattgcaatcgtggatggacaaagttctcgtggtgtacgtcgatgatgatgttcagttacgccgccttatggcacgtaacgggtttactgaagaagaagctctgaagcgcattcgttcacagtggcccagtgcggagaaagttaaacgtgcagacgctgtcatcgacaataatggcaatattgaagaaacccgccgccagctgctggacattttacaccagtgggatctgctggacaaaggtggctccggccaccatcatcaccatcactaatga

SEQ ID NO: 4656 - protein, 211 aa, synthetic construct
  REGION 1..211: note = Variant of 3'O-kinase
MAVTIGLTGGIAAGKSTVSAMMRELGLPVIDADEAARAVMKPGEEAYRDIVAEFGPGILRADGEIDRQKLGAIRFSDEQQRKVLNSIVGPAVLKKMTAEWEAHIGSGAKTVVLDIPLLFESGLQSWMDKVLVVYVDDDVQLRRLMARNGFTEEEALKRIRSQWPSAEKVKRADAVIDNNGNIEETRRQLLDILHQWDLLDKGGSGHHHHHH

SEQ ID NO: 4657 - DNA, 639 bp, synthetic construct
  misc_feature 1..639: note = Variant of 3'O-kinase
  source 1..639: mol_type = other DNA
atggcggttaccattggtttaacaggagggatcgcagcgggcaaatcgactgtgagtgccatgatgcgtgaactgggtctgccggtcatcgatgctgacgaggcagcacgcgccgttatgaagccaggcgaagaagcgtatcgcgacattgtagctgaattcgggccgggcatccttcgtgcggattttgagatcgatcgccagaaactgggtgctatccgcttttcggacgaacaacaacgtaaggtgctgaattcgattgtaggtcctgcagtcctgaagaagatgctcgcggagtgggaagctcatatcgggtcaggcgccaagacggttgtgctggatatcccgctgctgttcgaatccggattgcaatcgtggatggacaaagttctcgtggtgtacgtcgatgatgatgttcagttacgccgccttatggcacgtaacgggtttactgaagaagaagctctgaagcgcattcgttcacagtggcccagtgcggagaaagttaaacgtgcagacgctgtcatcgacaataatggcaatattgaagaaacccgccgccagctgctggacattttacaccagtgggatctgctggacaaaggtggctccggccaccatcatcaccatcactaatga

SEQ ID NO: 4658 - protein, 211 aa, synthetic construct
  REGION 1..211: note = Variant of 3'O-kinase
MAVTIGLTGGIAAGKSTVSAMMRELGLPVIDADEAARAVMKPGEEAYRDIVAEFGPGILRADFEIDRQKLGAIRFSDEQQRKVLNSIVGPAVLKKMLAEWEAHIGSGAKTVVLDIPLLFESGLQSWMDKVLVVYVDDDVQLRRLMARNGFTEEEALKRIRSQWPSAEKVKRADAVIDNNGNIEETRRQLLDILHQWDLLDKGGSGHHHHHH

SEQ ID NO: 4659 - DNA, 639 bp, synthetic construct
  misc_feature 1..639: note = Variant of 3'O-kinase
  source 1..639: mol_type = other DNA
atggcggttaccattggtttaacaggagggatcgcagcgggcaaatcgactgtgagtgccatgatgcgtgaactgggtctgccggtcatcgatgctgacgaggcagcacgcgccgttatgaagccaggcgaagaagcgtatcgcgacattgtagctgaattcgggccgggcatccttcgtgcggatggcgagatcgatcgccagaaactgggtgctatccgcttttcggacgaacaacaacgtaaggtgctgaattcgattgtaggtcctgcagtcctgaagaagatgctcgcggagtgggaagctcatcttgggtcaggcgccaagacggttgtgctggatatcccgctgctgttcgaatccggattgcaatcgtggatggacaaagttctcgtggtgtacgtcgatgatgatgttcagttacgccgccttatggcacgtaacgggtttactgaagaagaagctctgaagcgcattcgttcacagtggcccagtgcggagaaagttaaacgtgcagacgctgtcatcgacaataatggcaatattgaagaaacccgccgccagctgctggacattttacaccagtgggatctgctggacaaaggtggctccggccaccatcatcaccatcactaatga

SEQ ID NO: 4660 - protein, 211 aa, synthetic construct
  REGION 1..211: note = Variant of 3'O-kinase
MAVTIGLTGGIAAGKSTVSAMMRELGLPVIDADEAARAVMKPGEEAYRDIVAEFGPGILRADGEIDRQKLGAIRFSDEQQRKVLNSIVGPAVLKKMLAEWEAHLGSGAKTVVLDIPLLFESGLQSWMDKVLVVYVDDDVQLRRLMARNGFTEEEALKRIRSQWPSAEKVKRADAVIDNNGNIEETRRQLLDILHQWDLLDKGGSGHHHHHH

SEQ ID NO: 4661 - DNA, 639 bp, synthetic construct
  misc_feature 1..639: note = Variant of 3'O-kinase
  source 1..639: mol_type = other DNA
atggcggttaccattggtttaacaggagggatcgcagcgggcaaatcgactgtgagtgccatgatgcgtgaactgggtctgccggtcatcgatgctgacgaggcagcacgcgccgttatgaagccaggcgaagaagcgtatcgcgacattgtagatgaattcgggccgggcatccttcgtgcggatggcgagatcgatcgccagaaactgggtgctatccgcttttcggacgaacaacaacgtaaggtgctgaattcgattgtaggtcctgcagtcctgaagaagatgctcgcggagtgggaagctcatatcgggtcaggcgccaagacggttgtgctggatatcccgctgctgttcgaatccggattgcaatcgtggatggacaaagttctcgtggtgtacgtcgatgatgatgttcagttacgccgccttatggcacgtaacgggtttactgaagaagaagctctgaagcgcattcgttcacagtggcccagtgcggagaaagttaaacgtgcagacgctgtcatcgacaataatggcaatattgaagaaacccgccgccagctgctggacattttacaccagtgggatctgctggacaaaggtggctccggccaccatcatcaccatcactaatga

SEQ ID NO: 4662 - protein, 211 aa, synthetic construct
  REGION 1..211: note = Variant of 3'O-kinase
MAVTIGLTGGIAAGKSTVSAMMRELGLPVIDADEAARAVMKPGEEAYRDIVDEFGPGILRADGEIDRQKLGAIRFSDEQQRKVLNSIVGPAVLKKMLAEWEAHIGSGAKTVVLDIPLLFESGLQSWMDKVLVVYVDDDVQLRRLMARNGFTEEEALKRIRSQWPSAEKVKRADAVIDNNGNIEETRRQLLDILHQWDLLDKGGSGHHHHHH

SEQ ID NO: 4663 - DNA, 639 bp, synthetic construct
  misc_feature 1..639: note = Variant of 3'O-kinase
  source 1..639: mol_type = other DNA
atggcggttaccattggtttaacaggagggatcgcagcgggcaaatcgactgtgagtgccatgatgcgtgaactgggtctgccggtcatcgatgctgacgaggcagcacgcgccgttatgaagccaggcgaagaagcgtatcgcgacattgtagctgaattcgggccgggcatccttcgtgcggatggcgagatcgatcgccagaaactgggtgctatccgcttttcggacgaacaacaacgtaaggtgctgaattcgattgtaggtcctgcagtcctgaagaagatgctcgcggagtgggaagctcatatcgggtcaggcgccaagacggttgtgctggatatcccgctgctgttcgaatccggattgcaatcgtggatggacaaagttctcgtggtgtacgtcgatgatgatttgcagttacgccgccttatggcacgtaacgggtttactgaagaagaagctctgaagcgcattcgttcacagtggcccagtgcggagaaagttaaacgtgcagacgctgtcatcgacaataatggcaatattgaagaaacccgccgccagctgctggacattttacaccagtgggatctgctggacaaaggtggctccggccaccatcatcaccatcactaatga

SEQ ID NO: 4664 - protein, 211 aa, synthetic construct
  REGION 1..211: note = Variant of 3'O-kinase
MAVTIGLTGGIAAGKSTVSAMMRELGLPVIDADEAARAVMKPGEEAYRDIVAEFGPGILRADGEIDRQKLGAIRFSDEQQRKVLNSIVGPAVLKKMLAEWEAHIGSGAKTVVLDIPLLFESGLQSWMDKVLVVYVDDDLQLRRLMARNGFTEEEALKRIRSQWPSAEKVKRADAVIDNNGNIEETRRQLLDILHQWDLLDKGGSGHHHHHH

SEQ ID NO: 4665 - DNA, 639 bp, synthetic construct
  misc_feature 1..639: note = Variant of 3'O-kinase
  source 1..639: mol_type = other DNA
atggcggttaccattggtttaacaggagggatcgcagcgggcaaatcgactgtgagtgccatgatgcgtgaactgggtctgccggtcatcgattgggacgaggcagcacgcgccgttatgaagccaggcgaagaagcgtatcgcgacattgtagctgaattcgggccgggcatccttcgtgcggatggcgagatcgatcgccagaaactgggtgctatccgcttttcggacgaacaacaacgtaaggtgctgaattcgattgtaggtcctgcagtcctgaagaagatgctcgcggagtgggaagctcatatcgggtcaggcgccaagacggttgtgctggatatcccgctgctgttcgaatccggattgcaatcgtggatggacaaagttctcgtggtgtacgtcgatgatgatgttcagttacgccgccttatggcacgtaacgggtttactgaagaagaagctctgaagcgcattcgttcacagtggcccagtgcggagaaagttaaacgtgcagacgctgtcatcgacaataatggcaatattgaagaaacccgccgccagctgctggacattttacaccagtgggatctgctggacaaaggtggctccggccaccatcatcaccatcactaatga

SEQ ID NO: 4666 - protein, 211 aa, synthetic construct
  REGION 1..211: note = Variant of 3'O-kinase
MAVTIGLTGGIAAGKSTVSAMMRELGLPVIDWDEAARAVMKPGEEAYRDIVAEFGPGILRADGEIDRQKLGAIRFSDEQQRKVLNSIVGPAVLKKMLAEWEAHIGSGAKTVVLDIPLLFESGLQSWMDKVLVVYVDDDVQLRRLMARNGFTEEEALKRIRSQWPSAEKVKRADAVIDNNGNIEETRRQLLDILHQWDLLDKGGSGHHHHHH

SEQ ID NO: 4667 - DNA, 639 bp, synthetic construct
  misc_feature 1..639: note = Variant of 3'O-kinase
  source 1..639: mol_type = other DNA
atggcggttaccattggtttaacaggagggatcgcagcgggcaaatcgactgtgagtgccatgatgcgtgaactgggtctgccggtcatcgatgctgacgaggcagcacgcgccgttatgaagccaggcgaagaagcgtatcgcgacattgtagctgaattcgggccgggcatccttcgtgcggatggcgagatcgatcgccagaaactgggtgctatccgcttttcggacgaacaacaacgtaaggtgctgaattcgattgtaggtcctgcagtcctgaagaagatgctcgcggagtgggaagctcatatcgggtcaggcgccaagacggttgtgctggatatcccgctgctgttcgaatccggattgcaatcgtggatggacaaagttctcgtggtgtacgtcgatgatgatgttcagttacgccgccttatggcacgtaacgggtttactgaagaagaagctctgaagcgcattcgttcacagtggcccagtgcggagaaagttaaacgtgcagacgctgtcatcgacaataatggcaatattgaagaaacccgccgccagctgctggacattttacaccagtgggatccgctggacaaaggtggctccggccaccatcatcaccatcactaatga

SEQ ID NO: 4668 - protein, 211 aa, synthetic construct
  REGION 1..211: note = Variant of 3'O-kinase
MAVTIGLTGGIAAGKSTVSAMMRELGLPVIDADEAARAVMKPGEEAYRDIVAEFGPGILRADGEIDRQKLGAIRFSDEQQRKVLNSIVGPAVLKKMLAEWEAHIGSGAKTVVLDIPLLFESGLQSWMDKVLVVYVDDDVQLRRLMARNGFTEEEALKRIRSQWPSAEKVKRADAVIDNNGNIEETRRQLLDILHQWDPLDKGGSGHHHHHH

SEQ ID NO: 4669 - DNA, 639 bp, synthetic construct
  misc_feature 1..639: note = Variant of 3'O-kinase
  source 1..639: mol_type = other DNA
atggcggttaccattggtttaacaggagggatcgcagcgggcaaatcgactgtgagtgccatgatgcgtgaactgggtctgccggtcatcgatgctgacgaggcaccgcgcgccgttatgaagccaggcgaagaagcgtatcgcgacattgtagctgaattcgggccgggcatccttcgtgcggatggcgagatcgatcgccagaaactgggtgctatccgcttttcggacgaacaacaacgtaaggtgctgaattcgattgtaggtcctgcagtcctgaagaagatgctcgcggagtgggaagctcatatcgggtcaggcgccaagacggttgtgctggatatcccgctgctgttcgaatccggattgcaatcgtggatggacaaagttctcgtggtgtacgtcgatgatgatgttcagttacgccgccttatggcacgtaacgggtttactgaagaagaagctctgaagcgcattcgttcacagtggcccagtgcggagaaagttaaacgtgcagacgctgtcatcgacaataatggcaatattgaagaaacccgccgccagctgctggacattttacaccagtgggatctgctggacaaaggtggctccggccaccatcatcaccatcactaatga

SEQ ID NO: 4670 - protein, 211 aa, synthetic construct
  REGION 1..211: note = Variant of 3'O-kinase
MAVTIGLTGGIAAGKSTVSAMMRELGLPVIDADEAPRAVMKPGEEAYRDIVAEFGPGILRADGEIDRQKLGAIRFSDEQQRKVLNSIVGPAVLKKMLAEWEAHIGSGAKTVVLDIPLLFESGLQSWMDKVLVVYVDDDVQLRRLMARNGFTEEEALKRIRSQWPSAEKVKRADAVIDNNGNIEETRRQLLDILHQWDLLDKGGSGHHHHHH

SEQ ID NO: 4671 - DNA, 639 bp, synthetic construct
  misc_feature 1..639: note = Variant of 3'O-kinase
  source 1..639: mol_type = other DNA
atggcggcgaccattggtttaacaggagggatcgcagcgggcaaatcgactgtgagtgccatgatgcgtgaactgggtctgccggtcatcgatgctgacgaggcagcacgcgccgttatgaagccaggcgaagaagcgtatcgcgacattgtagctgaattcgggccgggcatccttcgtgcggatggcgagatcgatcgccagaaactgggtgctatccgcttttcggacgaacaacaacgtaaggtgctgaattcgattgtaggtcctgcagtcctgaagaagatgctcgcggagtgggaagctcatatcgggtcaggcgccaagacggttgtgctggatatcccgctgctgttcgaatccggattgcaatcgtggatggacaaagttctcgtggtgtacgtcgatgatgatgttcagttacgccgccttatggcacgtaacgggtttactgaagaagaagctctgaagcgcattcgttcacagtggcccagtgcggagaaagttaaacgtgcagacgctgtcatcgacaataatggcaatattgaagaaacccgccgccagctgctggacattttacaccagtgggatctgctggacaaaggtggctccggccaccatcatcaccatcactaatga

SEQ ID NO: 4672 - protein, 211 aa, synthetic construct
  REGION 1..211: note = Variant of 3'O-kinase
MAATIGLTGGIAAGKSTVSAMMRELGLPVIDADEAARAVMKPGEEAYRDIVAEFGPGILRADGEIDRQKLGAIRFSDEQQRKVLNSIVGPAVLKKMLAEWEAHIGSGAKTVVLDIPLLFESGLQSWMDKVLVVYVDDDVQLRRLMARNGFTEEEALKRIRSQWPSAEKVKRADAVIDNNGNIEETRRQLLDILHQWDLLDKGGSGHHHHHH

SEQ ID NO: 4673 - DNA, 639 bp, synthetic construct
  misc_feature 1..639: note = Variant of 3'O-kinase
  source 1..639: mol_type = other DNA
atggcggttaccattggtttaacaggagggatcgcagcgggcaaatcgactgtgagtgccatgatgcgtgaactgggtctgccggtcatcgatgctgacgaggcagcacgcgccgttatgaagccaggcgaagaagcgtatcgcgacattgtagctgaattcgggccgggcatccttcgtgcggatggcgagatcgatcgccagaaactgggtgctatccgcttttcggacgaacaagtgcgtaaggtgctgaattcgattgtaggtcctgcagtcctgaagaagatgctcgcggagtgggaagctcatatcgggtcaggcgccaagacggttgtgctggatatcccgctgctgttcgaatccggattgcaatcgtggatggacaaagttctcgtggtgtacgtcgatgatgatgttcagttacgccgccttatggcacgtaacgggtttactgaagaagaagctctgaagcgcattcgttcacagtggcccagtgcggagaaagttaaacgtgcagacgctgtcatcgacaataatggcaatattgaagaaacccgccgccagctgctggacattttacaccagtgggatctgctggacaaaggtggctccggccaccatcatcaccatcactaatga

SEQ ID NO: 4674 - protein, 211 aa, synthetic construct
  REGION 1..211: note = Variant of 3'O-kinase
MAVTIGLTGGIAAGKSTVSAMMRELGLPVIDADEAARAVMKPGEEAYRDIVAEFGPGILRADGEIDRQKLGAIRFSDEQVRKVLNSIVGPAVLKKMLAEWEAHIGSGAKTVVLDIPLLFESGLQSWMDKVLVVYVDDDVQLRRLMARNGFTEEEALKRIRSQWPSAEKVKRADAVIDNNGNIEETRRQLLDILHQWDLLDKGGSGHHHHHH

SEQ ID NO: 4675 - DNA, 639 bp, synthetic construct
  misc_feature 1..639: note = Variant of 3'O-kinase
  source 1..639: mol_type = other DNA
atggcggttaccattggtttaacaggagggatcgcagcgggcaaatcgactgtgagtgccatgatgcgtgaactgggtctgccggtcatcgatgctgacgaggcagcacgcgccgttatgaagccaggcgaagaagcgtatgaggacattgtagctgaattcgggccgggcatccttcgtgcggatggcgagatcgatcgccagaaactgggtgctatccgcttttcggacgaacaacaacgtaaggtgctgaattcgattgtaggtcctgcagtcctgaagaagatgctcgcggagtgggaagctcatatcgggtcaggcgccaagacggttgtgctggatatcccgctgctgttcgaatccggattgcaatcgtggatggacaaagttctcgtggtgtacgtcgatgatgatgttcagttacgccgccttatggcacgtaacgggtttactgaagaagaagctctgaagcgcattcgttcacagtggcccagtgcggagaaagttaaacgtgcagacgctgtcatcgacaataatggcaatattgaagaaacccgccgccagctgctggacattttacaccagtgggatctgctggacaaaggtggctccggccaccatcatcaccatcactaatga

SEQ ID NO: 4676 - protein, 211 aa, synthetic construct
  REGION 1..211: note = Variant of 3'O-kinase
MAVTIGLTGGIAAGKSTVSAMMRELGLPVIDADEAARAVMKPGEEAYEDIVAEFGPGILRADGEIDRQKLGAIRFSDEQQRKVLNSIVGPAVLKKMLAEWEAHIGSGAKTVVLDIPLLFESGLQSWMDKVLVVYVDDDVQLRRLMARNGFTEEEALKRIRSQWPSAEKVKRADAVIDNNGNIEETRRQLLDILHQWDLLDKGGSGHHHHHH

SEQ ID NO: 4677 - DNA, 639 bp, synthetic construct
  misc_feature 1..639: note = Variant of 3'O-kinase
  source 1..639: mol_type = other DNA
atggcggttaccattggtttaacaggagggatcgcagcgggcaaatcgactgtgagtgccatgatgcgtgaactgggtctgccggtcatcgatgctgacgaggcagcacgcgccgttatgaagccaggcgaagaagcgtatcgcgacattgtagctgaattcgggccgggcatccttcgtgcggatggcgagatcgatcgccagaaactgggtgctatccgcttttcggacgaacaacaacgtaaggtgctgaattcgattgtaggtcctgcagtcctgaagaagatgctcgcggagaatgaagctcatatcgggtcaggcgccaagacggttgtgctggatatcccgctgctgttcgaatccggattgcaatcgtggatggacaaagttctcgtggtgtacgtcgatgatgatgttcagttacgccgccttatggcacgtaacgggtttactgaagaagaagctctgaagcgcattcgttcacagtggcccagtgcggagaaagttaaacgtgcagacgctgtcatcgacaataatggcaatattgaagaaacccgccgccagctgctggacattttacaccagtgggatctgctggacaaaggtggctccggccaccatcatcaccatcactaatga

SEQ ID NO: 4678 - protein, 211 aa, synthetic construct
  REGION 1..211: note = Variant of 3'O-kinase
MAVTIGLTGGIAAGKSTVSAMMRELGLPVIDADEAARAVMKPGEEAYRDIVAEFGPGILRADGEIDRQKLGAIRFSDEQQRKVLNSIVGPAVLKKMLAENEAHIGSGAKTVVLDIPLLFESGLQSWMDKVLVVYVDDDVQLRRLMARNGFTEEEALKRIRSQWPSAEKVKRADAVIDNNGNIEETRRQLLDILHQWDLLDKGGSGHHHHHH

SEQ ID NO: 4679 - DNA, 639 bp, synthetic construct
  misc_feature 1..639: note = Variant of 3'O-kinase
  source 1..639: mol_type = other DNA
atggcggttaccattggtttaacaggagggatcgcagcgggcaaatcgactgtgagtgccatgatgcgtgaactgggtctgccggtcatcgatgctgacgaggcagcacgcgccgttatgaagccaggcgaagaagcgtatcgcgacattgtagctgaattcgggccgggcatccttcgtgcggatggcgagatcgatcgccagaaactgggtgctatccgcttttcggacgaacaacaacgtaaggtgctgaattcgattgtaggtcctgcagtcctgaagaagatgctcgcggagtgggaagctcatatcgggtcaggcgccaagacggttgtgctggatatcccgctgctgttcgaatccggattgcaatcgtggatggacaaagttctcgtggtgtacgtcgatgatgatgttcagttacgccgccttatggcacgtaacgggtttactgaagaagaagctctgaagcgcattcgttcacagtggcccagtgcggagaaagttaaacgtgcagacgctgtcatcgacaataatggcaatattgaagaaacccgccgccagctgctggacattttacaccagtgggatggtctggacaaaggtggctccggccaccatcatcaccatcactaatga

SEQ ID NO: 4680 - protein, 211 aa, synthetic construct
  REGION 1..211: note = Variant of 3'O-kinase
MAVTIGLTGGIAAGKSTVSAMMRELGLPVIDADEAARAVMKPGEEAYRDIVAEFGPGILRADGEIDRQKLGAIRFSDEQQRKVLNSIVGPAVLKKMLAEWEAHIGSGAKTVVLDIPLLFESGLQSWMDKVLVVYVDDDVQLRRLMARNGFTEEEALKRIRSQWPSAEKVKRADAVIDNNGNIEETRRQLLDILHQWDGLDKGGSGHHHHHH

SEQ ID NO: 4681 - DNA, 639 bp, synthetic construct
  misc_feature 1..639: note = Variant of 3'O-kinase
  source 1..639: mol_type = other DNA
atggcggttaccattggtttaacaggagggatcgcagcgggcaaatcgactgtgagtgccatgatgcgtgaactgggtctgccggtcatcgatgctgacgaggcagcacgcgccgttatgaagccaggcgaagaagcgtatcgcgacattgtagctgaattcgggccgggcatccttcgtgcggatcaggagatcgatcgccagaaactgggtgctatccgcttttcggacgaacaacaacgtaaggtgctgaattcgattgtaggtcctgcagtcctgaagaagatgctcgcggagtgggaagctcatatcgggtcaggcgccaagacggttgtgctggatatcccgctgctgttcgaatccggattgcaatcgtggatggacaaagttctcgtggtgtacgtcgatgatgatgttcagttacgccgccttatggcacgtaacgggtttactgaagaagaagctctgaagcgcattcgttcacagtggcccagtgcggagaaagttaaacgtgcagacgctgtcatcgacaataatggcaatattgaagaaacccgccgccagctgctggacattttacaccagtgggatctgctggacaaaggtggctccggccaccatcatcaccatcactaatga

SEQ ID NO: 4682 - protein, 211 aa, synthetic construct
  REGION 1..211: note = Variant of 3'O-kinase
MAVTIGLTGGIAAGKSTVSAMMRELGLPVIDADEAARAVMKPGEEAYRDIVAEFGPGILRADQEIDRQKLGAIRFSDEQQRKVLNSIVGPAVLKKMLAEWEAHIGSGAKTVVLDIPLLFESGLQSWMDKVLVVYVDDDVQLRRLMARNGFTEEEALKRIRSQWPSAEKVKRADAVIDNNGNIEETRRQLLDILHQWDLLDKGGSGHHHHHH

SEQ ID NO: 4683 - DNA, 639 bp, synthetic construct
  misc_feature 1..639: note = Variant of 3'O-kinase
  source 1..639: mol_type = other DNA
atggcggttaccattggtttaacaggagggatcgcagcgggcaaatcgactgtgagtgccatgatgcgtgaactgggtctgccggtcatcgatgctgacgaggcagcacgcgccgttatgaagccaggcgaagaagcgtatcgcgacattgtagctgaattcgggccgggcatccttcgtgcggatggcgagatcgatcgccagaaactgggtgctatccgcttttcggacgaacaacaacgtaaggtgctgaattcgattgtaggtcctgcaactctgaagaagatgctcgcggagtgggaagctcatatcgggtcaggcgccaagacggttgtgctggatatcccgctgctgttcgaatccggattgcaatcgtggatggacaaagttctcgtggtgtacgtcgatgatgatgttcagttacgccgccttatggcacgtaacgggtttactgaagaagaagctctgaagcgcattcgttcacagtggcccagtgcggagaaagttaaacgtgcagacgctgtcatcgacaataatggcaatattgaagaaacccgccgccagctgctggacattttacaccagtgggatctgctggacaaaggtggctccggccaccatcatcaccatcactaatga

SEQ ID NO: 4684 - protein, 211 aa, synthetic construct
  REGION 1..211: note = Variant of 3'O-kinase
MAVTIGLTGGIAAGKSTVSAMMRELGLPVIDADEAARAVMKPGEEAYRDIVAEFGPGILRADGEIDRQKLGAIRFSDEQQRKVLNSIVGPATLKKMLAEWEAHIGSGAKTVVLDIPLLFESGLQSWMDKVLVVYVDDDVQLRRLMARNGFTEEEALKRIRSQWPSAEKVKRADAVIDNNGNIEETRRQLLDILHQWDLLDKGGSGHHHHHH

SEQ ID NO: 4685 - DNA, 639 bp, synthetic construct
  misc_feature 1..639: note = Variant of 3'O-kinase
  source 1..639: mol_type = other DNA
atggcggttaccattggtttaacaggagggatcgcagcgggcaaatcgactgtgagtgccatgatgcgtgaactgggtctgccggtcatcgatgctgacgaggcagcacgcgccgttatgaagccaggcgaagaagcgtatcgcgacattgtagctgaattcgggccgggcatccttcgtgcggatggcgagatcgatcgccagaaactgggtgctatccgcttttcggacgaacaacaacgtaaggtgctgaattcgattgtaggtcctgcagtcctgaagaagatgctcgcggagtgggaagctcatatcgggtcaggcgccaagacggttgtgctggatatcccgctgctgttcgaatccggattgcaatcgtggatggacaaagttctcgtggtgtacgtcgatgatgatcgtcagttacgccgccttatggcacgtaacgggtttactgaagaagaagctctgaagcgcattcgttcacagtggcccagtgcggagaaagttaaacgtgcagacgctgtcatcgacaataatggcaatattgaagaaacccgccgccagctgctggacattttacaccagtgggatctgctggacaaaggtggctccggccaccatcatcaccatcactaatga

SEQ ID NO: 4686 - protein, 211 aa, synthetic construct
  REGION 1..211: note = Variant of 3'O-kinase
MAVTIGLTGGIAAGKSTVSAMMRELGLPVIDADEAARAVMKPGEEAYRDIVAEFGPGILRADGEIDRQKLGAIRFSDEQQRKVLNSIVGPAVLKKMLAEWEAHIGSGAKTVVLDIPLLFESGLQSWMDKVLVVYVDDDRQLRRLMARNGFTEEEALKRIRSQWPSAEKVKRADAVIDNNGNIEETRRQLLDILHQWDLLDKGGSGHHHHHH

SEQ ID NO: 4687 - DNA, 639 bp, synthetic construct
  misc_feature 1..639: note = Variant of 3'O-kinase
  source 1..639: mol_type = other DNA
atggcggttaccattggtttaacaggagggatcgcagcgggcaaatcgactgtgagtgccatgatgcgtgaactgggtctgccggtcatcgatgctgacgaggcagcacgcgccgttatgaagccaggcgaagaagcgtatcgcgacattgtagctgaattcgggccgggcatccttcgtgcggatggcgagatcgatcgccagaaactgggtgctatccgcttttcggacgaacaacaacgtaaggtgctgaattcgattgtaggtcctgcagtcctgaagaagatgctcgcggagtgggaagctcatatcgggtcaggcgccaagacggttgtgctggatatcccgctgctgttcgaatccggattgcaatcgtggatggacaaagttctcgtggtgtacgtcgatgatgatacgcagttacgccgccttatggcacgtaacgggtttactgaagaagaagctctgaagcgcattcgttcacagtggcccagtgcggagaaagttaaacgtgcagacgctgtcatcgacaataatggcaatattgaagaaacccgccgccagctgctggacattttacaccagtgggatctgctggacaaaggtggctccggccaccatcatcaccatcactaatga

SEQ ID NO: 4688 - protein, 211 aa, synthetic construct
  REGION 1..211: note = Variant of 3'O-kinase
MAVTIGLTGGIAAGKSTVSAMMRELGLPVIDADEAARAVMKPGEEAYRDIVAEFGPGILRADGEIDRQKLGAIRFSDEQQRKVLNSIVGPAVLKKMLAEWEAHIGSGAKTVVLDIPLLFESGLQSWMDKVLVVYVDDDTQLRRLMARNGFTEEEALKRIRSQWPSAEKVKRADAVIDNNGNIEETRRQLLDILHQWDLLDKGGSGHHHHHH

SEQ ID NO: 4689 - DNA, 639 bp, synthetic construct
  misc_feature 1..639: note = Variant of 3'O-kinase
  source 1..639: mol_type = other DNA
atggcggttaccattggtttaacaggagggatcgcagcgggcaaatcgactgtgagtgccatgatgcgtgaactgggtctgccggtcatcgatgctgacgaggcagcacgcgccgttatgaagccaggcgaagaagcgtatcgcgacattgtagctgaattcgggccgggcatccttcgtgcggatggcgagatcgatcgccagaaactgggtgctatccgcttttcggacgaacaacaacgtaaggtgctgaattcgattgtaggtcctgcagtcctgaagaagatgctcgcggagtgggaagctcatatcgggtcaggcgccaagacggttgtgctggatatcccgctgctgttcgaatccggattgcaatcgtggatggacaaagttctcgtggtgtacgtcgatgatgatgttcagttacgccgccttatggcacgtaacgggtttactgaagttgaagctctgaagcgcattcgttcacagtggcccagtgcggagaaagttaaacgtgcagacgctgtcatcgacaataatggcaatattgaagaaacccgccgccagctgctggacattttacaccagtgggatctgctggacaaaggtggctccggccaccatcatcaccatcactaatga

SEQ ID NO: 4690 - protein, 211 aa, synthetic construct
  REGION 1..211: note = Variant of 3'O-kinase
MAVTIGLTGGIAAGKSTVSAMMRELGLPVIDADEAARAVMKPGEEAYRDIVAEFGPGILRADGEIDRQKLGAIRFSDEQQRKVLNSIVGPAVLKKMLAEWEAHIGSGAKTVVLDIPLLFESGLQSWMDKVLVVYVDDDVQLRRLMARNGFTEVEALKRIRSQWPSAEKVKRADAVIDNNGNIEETRRQLLDILHQWDLLDKGGSGHHHHHH

SEQ ID NO: 4691 - DNA, 639 bp, synthetic construct
  misc_feature 1..639: note = Variant of 3'O-kinase
  source 1..639: mol_type = other DNA
atggcggttaccattggtttaacaggagggatcgcagcgggcaaatcgactgtgagtgccatgatgcgtgaactgggtctgccggtcatcgatgctgacgaggcagcacgcgccgttatgaagccaggcgaagaagcgtatcctgacattgtagctgaattcgggccgggcatccttcgtgcggatggcgagatcgatcgccagaaactgggtgctatccgcttttcggacgaacaacaacgtaaggtgctgaattcgattgtaggtcctgcagtcctgaagaagatgctcgcggagtgggaagctcatatcgggtcaggcgccaagacggttgtgctggatatcccgctgctgttcgaatccggattgcaatcgtggatggacaaagttctcgtggtgtacgtcgatgatgatgttcagttacgccgccttatggcacgtaacgggtttactgaagaagaagctctgaagcgcattcgttcacagtggcccagtgcggagaaagttaaacgtgcagacgctgtcatcgacaataatggcaatattgaagaaacccgccgccagctgctggacattttacaccagtgggatctgctggacaaaggtggctccggccaccatcatcaccatcactaatga

SEQ ID NO: 4692 - protein, 211 aa, synthetic construct
  REGION 1..211: note = Variant of 3'O-kinase
MAVTIGLTGGIAAGKSTVSAMMRELGLPVIDADEAARAVMKPGEEAYPDIVAEFGPGILRADGEIDRQKLGAIRFSDEQQRKVLNSIVGPAVLKKMLAEWEAHIGSGAKTVVLDIPLLFESGLQSWMDKVLVVYVDDDVQLRRLMARNGFTEEEALKRIRSQWPSAEKVKRADAVIDNNGNIEETRRQLLDILHQWDLLDKGGSGHHHHHH

SEQ ID NO: 4693 - DNA, 639 bp, synthetic construct
  misc_feature 1..639: note = Variant of 3'O-kinase
  source 1..639: mol_type = other DNA
atggcggttaccattggtttaacaggagggatcgcagcgggcaaatcgactgtgagtgccatgatgcgtgaactgggtctgccggtcatcgatgctgacgaggcagcacgcgccgttatgaagccaggcgaagaagcgtatcgcgacattgtagctgaattcgggaagggcatccttcgtgcggatggcgagatcgatcgccagaaactgggtgctatccgcttttcggacgaacaacaacgtaaggtgctgaattcgattgtaggtcctgcagtcctgaagaagatgctcgcggagtgggaagctcatatcgggtcaggcgccaagacggttgtgctggatatcccgctgctgttcgaatccggattgcaatcgtggatggacaaagttctcgtggtgtacgtcgatgatgatgttcagttacgccgccttatggcacgtaacgggtttactgaagaagaagctctgaagcgcattcgttcacagtggcccagtgcggagaaagttaaacgtgcagacgctgtcatcgacaataatggcaatattgaagaaacccgccgccagctgctggacattttacaccagtgggatctgctggacaaaggtggctccggccaccatcatcaccatcactaatga

SEQ ID NO: 4694 - protein, 211 aa, synthetic construct
  REGION 1..211: note = Variant of 3'O-kinase
MAVTIGLTGGIAAGKSTVSAMMRELGLPVIDADEAARAVMKPGEEAYRDIVAEFGKGILRADGEIDRQKLGAIRFSDEQQRKVLNSIVGPAVLKKMLAEWEAHIGSGAKTVVLDIPLLFESGLQSWMDKVLVVYVDDDVQLRRLMARNGFTEEEALKRIRSQWPSAEKVKRADAVIDNNGNIEETRRQLLDILHQWDLLDKGGSGHHHHHH

SEQ ID NO: 4695 - DNA, 639 bp, synthetic construct
  misc_feature 1..639: note = Variant of 3'O-kinase
  source 1..639: mol_type = other DNA
atggcggttaccattggtttaacaggagggatcgcagcgggcaaatcgactgtgagtgccatgatgcgtgaactgggtctgccggtcatcgatgctgacgaggcagcacgcgccgttatgaagccaggcgaagaagcgtatcgcgacattgtagctgaattcgggccgggcatccttcgtgcggatggcgagatcgatcgccagaaactgggtgctatccgcttttcggacgaacaacaacgtaaggtgctgaattcgattgtaggtcctgcagtcctggggaagatgctcgcggagtgggaagctcatatcgggtcaggcgccaagacggttgtgctggatatcccgctgctgttcgaatccggattgcaatcgtggatggacaaagttctcgtggtgtacgtcgatgatgatgttcagttacgccgccttatggcacgtaacgggtttactgaagaagaagctctgaagcgcattcgttcacagtggcccagtgcggagaaagttaaacgtgcagacgctgtcatcgacaataatggcaatattgaagaaacccgccgccagctgctggacattttacaccagtgggatctgctggacaaaggtggctccggccaccatcatcaccatcactaatga

SEQ ID NO: 4696 - protein, 211 aa, synthetic construct
  REGION 1..211: note = Variant of 3'O-kinase
MAVTIGLTGGIAAGKSTVSAMMRELGLPVIDADEAARAVMKPGEEAYRDIVAEFGPGILRADGEIDRQKLGAIRFSDEQQRKVLNSIVGPAVLGKMLAEWEAHIGSGAKTVVLDIPLLFESGLQSWMDKVLVVYVDDDVQLRRLMARNGFTEEEALKRIRSQWPSAEKVKRADAVIDNNGNIEETRRQLLDILHQWDLLDKGGSGHHHHHH

SEQ ID NO: 4697 - DNA, 639 bp, synthetic construct
  misc_feature 1..639: note = Variant of 3'O-kinase
  source 1..639: mol_type = other DNA
atggcggttaccattggtttaacaggagggatcgcagcgggcaaatcgactgtgagtgccatgatgcgtgaactgggtctgccggtcatcgatgctgacgaggcagcacgcgccgttatgaagccaggcgaagaagcgtatcgcgacattgctgctgaattcgggccgggcatccttcgtgcggatggcgagatcgatcgccagaaactgggtgctatccgcttttcggacgaacaacaacgtaaggtgctgaattcgattgtaggtcctgcagtcctgaagaagatgctcgcggagtgggaagctcatatcgggtcaggcgccaagacggttgtgctggatatcccgctgctgttcgaatccggattgcaatcgtggatggacaaagttctcgtggtgtacgtcgatgatgatgttcagttacgccgccttatggcacgtaacgggtttactgaagaagaagctctgaagcgcattcgttcacagtggcccagtgcggagaaagttaaacgtgcagacgctgtcatcgacaataatggcaatattgaagaaacccgccgccagctgctggacattttacaccagtgggatctgctggacaaaggtggctccggccaccatcatcaccatcactaatga

SEQ ID NO: 4698 - protein, 211 aa, synthetic construct
  REGION 1..211: note = Variant of 3'O-kinase
MAVTIGLTGGIAAGKSTVSAMMRELGLPVIDADEAARAVMKPGEEAYRDIAAEFGPGILRADGEIDRQKLGAIRFSDEQQRKVLNSIVGPAVLKKMLAEWEAHIGSGAKTVVLDIPLLFESGLQSWMDKVLVVYVDDDVQLRRLMARNGFTEEEALKRIRSQWPSAEKVKRADAVIDNNGNIEETRRQLLDILHQWDLLDKGGSGHHHHHH

SEQ ID NO: 4699 - DNA, 639 bp, synthetic construct
  misc_feature 1..639: note = Variant of 3'O-kinase
  source 1..639: mol_type = other DNA
atggcggttaccattggtttaacaggagggatcgcagcgggcaaatcgactgtgagtgccatgatgcgtgaactgggtctgccggtcatcgatgctgacgaggcagcacgcgccgttatgaagccaggcgaagaagcgtatcgcgacattgtagctgaattcgggccgggcatccttcgtgcggatggcgagatcgatcgccagaaactgggtgctatccgcttttcggaggaacaacaacgtaaggtgctgaattcgattgtaggtcctgcagtcctgaagaagatgctcgcggagtgggaagctcatatcgggtcaggcgccaagacggttgtgctggatatcccgctgctgttcgaatccggattgcaatcgtggatggacaaagttctcgtggtgtacgtcgatgatgatgttcagttacgccgccttatggcacgtaacgggtttactgaagaagaagctctgaagcgcattcgttcacagtggcccagtgcggagaaagttaaacgtgcagacgctgtcatcgacaataatggcaatattgaagaaacccgccgccagctgctggacattttacaccagtgggatctgctggacaaaggtggctccggccaccatcatcaccatcactaatga

SEQ ID NO: 4700 - protein, 211 aa, synthetic construct
  REGION 1..211: note = Variant of 3'O-kinase
MAVTIGLTGGIAAGKSTVSAMMRELGLPVIDADEAARAVMKPGEEAYRDIVAEFGPGILRADGEIDRQKLGAIRFSEEQQRKVLNSIVGPAVLKKMLAEWEAHIGSGAKTVVLDIPLLFESGLQSWMDKVLVVYVDDDVQLRRLMARNGFTEEEALKRIRSQWPSAEKVKRADAVIDNNGNIEETRRQLLDILHQWDLLDKGGSGHHHHHH

SEQ ID NO: 4701 - DNA, 639 bp, synthetic construct
  misc_feature 1..639: note = Variant of 3'O-kinase
  source 1..639: mol_type = other DNA
atggcggttaccattggtttaacaggagggatcgcagcgggcaaatcgactgtgagtgccatgatgcgtgaactgggtctgccggtcatcgatgctgacgaggcagcacgcgccgttatgaagccaggcgaagaagcgtatcgcgacattgtagctgaattcgggccgggcatccttcgtgcggatggcgagatcgatcgccagaaactgggtgctatccgcttttcggacgaacaacaacgtaaggtgctgaattcgattgtaggtcctgcagtcctgaagaagatgctcgcggagtgggaagctcatatcgggtcaggcgccaagacggttgtgctggatatcccgctgctgttcgaatccggattgcaatcgtggatggacaaagttctcgtggtgtacgtcgatgatgatgttcagttacgccgccttatggcacgtaacgggtttactgaagaagaagctctgaagcgcattcgttcacagtggcccagtgcggagaaagttaaacgtgcagacgctgtcatcgacaataatggcaatattgaagaaacccgccgccagctgctggacattttaatgcagtgggatctgctggacaaaggtggctccggccaccatcatcaccatcactaatga

SEQ ID NO: 4702 - protein, 211 aa, synthetic construct
  REGION 1..211: note = Variant of 3'O-kinase
MAVTIGLTGGIAAGKSTVSAMMRELGLPVIDADEAARAVMKPGEEAYRDIVAEFGPGILRADGEIDRQKLGAIRFSDEQQRKVLNSIVGPAVLKKMLAEWEAHIGSGAKTVVLDIPLLFESGLQSWMDKVLVVYVDDDVQLRRLMARNGFTEEEALKRIRSQWPSAEKVKRADAVIDNNGNIEETRRQLLDILMQWDLLDKGGSGHHHHHH

SEQ ID NO: 4703 - DNA, 639 bp, synthetic construct
  misc_feature 1..639: note = Variant of 3'O-kinase
  source 1..639: mol_type = other DNA
atggcggttaccattggtttaacaggagggatcgcagcgggcaaatcgactgtgagtgccatgatgcgtgaactgggtctgccggtcatcgatgctgacgaggcagcacgcgccgttatgaagccaggcgaagaagcgtatcgcgacattgtagctgaattcggggggggcatccttcgtgcggatggcgagatcgatcgccagaaactgggtgctatccgcttttcggacgaacaacaacgtaaggtgctgaattcgattgtaggtcctgcagtcctgaagaagatgctcgcggagtgggaagctcatatcgggtcaggcgccaagacggttgtgctggatatcccgctgctgttcgaatccggattgcaatcgtggatggacaaagttctcgtggtgtacgtcgatgatgatgttcagttacgccgccttatggcacgtaacgggtttactgaagaagaagctctgaagcgcattcgttcacagtggcccagtgcggagaaagttaaacgtgcagacgctgtcatcgacaataatggcaatattgaagaaacccgccgccagctgctggacattttacaccagtgggatctgctggacaaaggtggctccggccaccatcatcaccatcactaatga

SEQ ID NO: 4704 - protein, 211 aa, synthetic construct
  REGION 1..211: note = Variant of 3'O-kinase
MAVTIGLTGGIAAGKSTVSAMMRELGLPVIDADEAARAVMKPGEEAYRDIVAEFGGGILRADGEIDRQKLGAIRFSDEQQRKVLNSIVGPAVLKKMLAEWEAHIGSGAKTVVLDIPLLFESGLQSWMDKVLVVYVDDDVQLRRLMARNGFTEEEALKRIRSQWPSAEKVKRADAVIDNNGNIEETRRQLLDILHQWDLLDKGGSGHHHHHH

SEQ ID NO: 4705 - DNA, 639 bp, synthetic construct
  misc_feature 1..639: note = Variant of 3'O-kinase
  source 1..639: mol_type = other DNA
atggcggttaccattggtttaacaggagggatcgcagcgggcaaatcgactgtgagtgccatgatgcgtgaactgggtctggaggtcatcgatgctgacgaggcagcacgcgccgttatgaagccaggcgaagaagcgtatcgcgacattgtagctgaattcgggccgggcatccttcgtgcggatggcgagatcgatcgccagaaactgggtgctatccgcttttcggacgaacaacaacgtaaggtgctgaattcgattgtaggtcctgcagtcctgaagaagatgctcgcggagtgggaagctcatatcgggtcaggcgccaagacggttgtgctggatatcccgctgctgttcgaatccggattgcaatcgtggatggacaaagttctcgtggtgtacgtcgatgatgatgttcagttacgccgccttatggcacgtaacgggtttactgaagaagaagctctgaagcgcattcgttcacagtggcccagtgcggagaaagttaaacgtgcagacgctgtcatcgacaataatggcaatattgaagaaacccgccgccagctgctggacattttacaccagtgggatctgctggacaaaggtggctccggccaccatcatcaccatcactaatga

SEQ ID NO: 4706 - protein, 211 aa, synthetic construct
  REGION 1..211: note = Variant of 3'O-kinase
MAVTIGLTGGIAAGKSTVSAMMRELGLEVIDADEAARAVMKPGEEAYRDIVAEFGPGILRADGEIDRQKLGAIRFSDEQQRKVLNSIVGPAVLKKMLAEWEAHIGSGAKTVVLDIPLLFESGLQSWMDKVLVVYVDDDVQLRRLMARNGFTEEEALKRIRSQWPSAEKVKRADAVIDNNGNIEETRRQLLDILHQWDLLDKGGSGHHHHHH

SEQ ID NO: 4707 - DNA, 639 bp, synthetic construct
  misc_feature 1..639: note = Variant of 3'O-kinase
  source 1..639: mol_type = other DNA
atggcggttaccattggtttaacaggagggatcgcagcgggcaaatcgactgtgagtgccatgatgcgtgaactgggtctgccggtcatcgatgctgacgaggcagcacgcgccgttatgaagccaggcgaagaagcgtatcgcgacattgtagctgaattcgggccgggcatcctttcggcggatggcgagatcgatcgccagaaactgggtgctatccgcttttcggacgaacaacaacgtaaggtgctgaattcgattgtaggtcctgcagtcctgaagaagatgctcgcggagtgggaagctcatatcgggtcaggcgccaagacggttgtgctggatatcccgctgctgttcgaatccggattgcaatcgtggatggacaaagttctcgtggtgtacgtcgatgatgatgttcagttacgccgccttatggcacgtaacgggtttactgaagaagaagctctgaagcgcattcgttcacagtggcccagtgcggagaaagttaaacgtgcagacgctgtcatcgacaataatggcaatattgaagaaacccgccgccagctgctggacattttacaccagtgggatctgctggacaaaggtggctccggccaccatcatcaccatcactaatga

SEQ ID NO: 4708 - protein, 211 aa, synthetic construct
  REGION 1..211: note = Variant of 3'O-kinase
MAVTIGLTGGIAAGKSTVSAMMRELGLPVIDADEAARAVMKPGEEAYRDIVAEFGPGILSADGEIDRQKLGAIRFSDEQQRKVLNSIVGPAVLKKMLAEWEAHIGSGAKTVVLDIPLLFESGLQSWMDKVLVVYVDDDVQLRRLMARNGFTEEEALKRIRSQWPSAEKVKRADAVIDNNGNIEETRRQLLDILHQWDLLDKGGSGHHHHHH

SEQ ID NO: 4709 - DNA, 639 bp, synthetic construct
  misc_feature 1..639: note = Variant of 3'O-kinase
  source 1..639: mol_type = other DNA
atggcggttaccattggtttaacaggagggatcgcagcgggcaaatcgactgtgagtgccatgatgcgtgaactgggtctgccggtcatcgatgctgacgaggttgcacgcgccgttatgaagccaggcgaagaagcgtatcgcgacattgtagctgaattcgggccgggcatccttcgtgcggatggcgagatcgatcgccagaaactgggtgctatccgcttttcggacgaacaacaacgtaaggtgctgaattcgattgtaggtcctgcagtcctgaagaagatgctcgcggagtgggaagctcatatcgggtcaggcgccaagacggttgtgctggatatcccgctgctgttcgaatccggattgcaatcgtggatggacaaagttctcgtggtgtacgtcgatgatgatgttcagttacgccgccttatggcacgtaacgggtttactgaagaagaagctctgaagcgcattcgttcacagtggcccagtgcggagaaagttaaacgtgcagacgctgtcatcgacaataatggcaatattgaagaaacccgccgccagctgctggacattttacaccagtgggatctgctggacaaaggtggctccggccaccatcatcaccatcactaatga

SEQ ID NO: 4710 - protein, 211 aa, synthetic construct
  REGION 1..211: note = Variant of 3'O-kinase
MAVTIGLTGGIAAGKSTVSAMMRELGLPVIDADEVARAVMKPGEEAYRDIVAEFGPGILRADGEIDRQKLGAIRFSDEQQRKVLNSIVGPAVLKKMLAEWEAHIGSGAKTVVLDIPLLFESGLQSWMDKVLVVYVDDDVQLRRLMARNGFTEEEALKRIRSQWPSAEKVKRADAVIDNNGNIEETRRQLLDILHQWDLLDKGGSGHHHHHH

SEQ ID NO: 4711 - DNA, 639 bp, synthetic construct
  misc_feature 1..639: note = Variant of 3'O-kinase
  source 1..639: mol_type = other DNA
atggcggttaccattggtttaacaggagggatcgcagcgggcaaatcgactgtgagtgccatgatgcgtgaactgggtctgccggtcatcgatgctgacgaggcagcacgcgccgttatgaagccaggcgaagaagcgtatcgcgacattgtagctgaattcgggccgggcatccttcgtgcggatggcgagatcgatcgccagaaactgggtgctatccgcttttcgtgggaacaacaacgtaaggtgctgaattcgattgtaggtcctgcagtcctgaagaagatgctcgcggagtgggaagctcatatcgggtcaggcgccaagacggttgtgctggatatcccgctgctgttcgaatccggattgcaatcgtggatggacaaagttctcgtggtgtacgtcgatgatgatgttcagttacgccgccttatggcacgtaacgggtttactgaagaagaagctctgaagcgcattcgttcacagtggcccagtgcggagaaagttaaacgtgcagacgctgtcatcgacaataatggcaatattgaagaaacccgccgccagctgctggacattttacaccagtgggatctgctggacaaaggtggctccggccaccatcatcaccatcactaatga

SEQ ID NO: 4712 - protein, 211 aa, synthetic construct
  REGION 1..211: note = Variant of 3'O-kinase
MAVTIGLTGGIAAGKSTVSAMMRELGLPVIDADEAARAVMKPGEEAYRDIVAEFGPGILRADGEIDRQKLGAIRFSWEQQRKVLNSIVGPAVLKKMLAEWEAHIGSGAKTVVLDIPLLFESGLQSWMDKVLVVYVDDDVQLRRLMARNGFTEEEALKRIRSQWPSAEKVKRADAVIDNNGNIEETRRQLLDILHQWDLLDKGGSGHHHHHH

SEQ ID NO: 4713 - DNA, 639 bp, synthetic construct
  misc_feature 1..639: note = Variant of 3'O-kinase
  source 1..639: mol_type = other DNA
atggcggttaccattggtttaacaggagggatcgcagcgggcaaatcgactgtgagtgccatgatgcgtgaactgggtctgccggtcatcgatgctgacgaggcagcacgcgccgttatgaagccaggcgaagaagcgtatcgcgacattgtagctgaattcgggccgggcatccttcgtgcggatggcgagatcgatcgccagaaactgggtgctatccgcttttcggacgaacaacaacgtaaggtgctggcttcgattgtaggtcctgcagtcctgaagaagatgctcgcggagtgggaagctcatatcgggtcaggcgccaagacggttgtgctggatatcccgctgctgttcgaatccggattgcaatcgtggatggacaaagttctcgtggtgtacgtcgatgatgatgttcagttacgccgccttatggcacgtaacgggtttactgaagaagaagctctgaagcgcattcgttcacagtggcccagtgcggagaaagttaaacgtgcagacgctgtcatcgacaataatggcaatattgaagaaacccgccgccagctgctggacattttacaccagtgggatctgctggacaaaggtggctccggccaccatcatcaccatcactaatga

SEQ ID NO: 4714 - protein, 211 aa, synthetic construct
  REGION 1..211: note = Variant of 3'O-kinase
MAVTIGLTGGIAAGKSTVSAMMRELGLPVIDADEAARAVMKPGEEAYRDIVAEFGPGILRADGEIDRQKLGAIRFSDEQQRKVLASIVGPAVLKKMLAEWEAHIGSGAKTVVLDIPLLFESGLQSWMDKVLVVYVDDDVQLRRLMARNGFTEEEALKRIRSQWPSAEKVKRADAVIDNNGNIEETRRQLLDILHQWDLLDKGGSGHHHHHH

SEQ ID NO: 4715 - DNA, 639 bp, synthetic construct
  misc_feature 1..639: note = Variant of 3'O-kinase
  source 1..639: mol_type = other DNA
atggcggttcagattggtttaacaggagggatcgcagcgggcaaatcgactgtgagtgccatgatgcgtgaactgggtctgccggtcatcgatgctgacgaggcagcacgcgccgttatgaagccaggcgaagaagcgtatcgcgacattgtagctgaattcgggccgggcatccttcgtgcggatggcgagatcgatcgccagaaactgggtgctatccgcttttcggacgaacaacaacgtaaggtgctgaattcgattgtaggtcctgcagtcctgaagaagatgctcgcggagtgggaagctcatatcgggtcaggcgccaagacggttgtgctggatatcccgctgctgttcgaatccggattgcaatcgtggatggacaaagttctcgtggtgtacgtcgatgatgatgttcagttacgccgccttatggcacgtaacgggtttactgaagaagaagctctgaagcgcattcgttcacagtggcccagtgcggagaaagttaaacgtgcagacgctgtcatcgacaataatggcaatattgaagaaacccgccgccagctgctggacattttacaccagtgggatctgctggacaaaggtggctccggccaccatcatcaccatcactaatga

SEQ ID NO: 4716 - protein, 211 aa, synthetic construct
  REGION 1..211: note = Variant of 3'O-kinase
MAVQIGLTGGIAAGKSTVSAMMRELGLPVIDADEAARAVMKPGEEAYRDIVAEFGPGILRADGEIDRQKLGAIRFSDEQQRKVLNSIVGPAVLKKMLAEWEAHIGSGAKTVVLDIPLLFESGLQSWMDKVLVVYVDDDVQLRRLMARNGFTEEEALKRIRSQWPSAEKVKRADAVIDNNGNIEETRRQLLDILHQWDLLDKGGSGHHHHHH

SEQ ID NO: 4717 - DNA, 639 bp, synthetic construct
  misc_feature 1..639: note = Variant of 3'O-kinase
  source 1..639: mol_type = other DNA
atggcggttaccattggtttaacaggagggatcgcagcgggcaaatcgactgtgagtgccatgatgcgtgaactgggtctgccggtcatcgatgctgacgaggcagcacgcgccgttatgaagccaggcgaagaagcgtatcgcgacattgtagctgaattcgggccgggcatccttcgtgcggatggcgagatcgatcgccagaaactgggtgctatccgcttttcggacgaacaacaacgtaaggtgctgaattcgattgtaggtcctgcagtcctgaagaagatgctcgcggagtgggaagctcatatcgggtcaggcgccaagacggttgtgctggatatcccgctgctgttcgaatccggattgcaatcgtggatggacaaagttctcgtggtgtacgtcgatgatgatgttcagttacgccgccttatggcacgtaacgggtttactgaagaagaagctctgaagcgcattcgttcacagtggcccagtgcggagaaagttaaacgtgcaccggctgtcatcgacaataatggcaatattgaagaaacccgccgccagctgctggacattttacaccagtgggatctgctggacaaaggtggctccggccaccatcatcaccatcactaatga

SEQ ID NO: 4718 - protein, 211 aa, synthetic construct
  REGION 1..211: note = Variant of 3'O-kinase
MAVTIGLTGGIAAGKSTVSAMMRELGLPVIDADEAARAVMKPGEEAYRDIVAEFGPGILRADGEIDRQKLGAIRFSDEQQRKVLNSIVGPAVLKKMLAEWEAHIGSGAKTVVLDIPLLFESGLQSWMDKVLVVYVDDDVQLRRLMARNGFTEEEALKRIRSQWPSAEKVKRAPAVIDNNGNIEETRRQLLDILHQWDLLDKGGSGHHHHHH

SEQ ID NO: 4719 - DNA, 639 bp, synthetic construct
  misc_feature 1..639: note = Variant of 3'O-kinase
  source 1..639: mol_type = other DNA
atggcggttaccattggtttaacaggagggatcgcagcgggcaaatcgactgtgagtgccatgatgcgtgaactgggtctgccggtcatcgatgctgacgaggcagcacgcgccgttatgaagccaggcgaagaagcgtatcgcgacattgtagctgaattcgggccgggcatccttcgtgcggatggcgagatcgatcgccagaaactgggtgctatccgcttttcggacgaacaacaacgtaaggtgctgaatcagattgtaggtcctgcagtcctgaagaagatgctcgcggagtgggaagctcatatcgggtcaggcgccaagacggttgtgctggatatcccgctgctgttcgaatccggattgcaatcgtggatggacaaagttctcgtggtgtacgtcgatgatgatgttcagttacgccgccttatggcacgtaacgggtttactgaagaagaagctctgaagcgcattcgttcacagtggcccagtgcggagaaagttaaacgtgcagacgctgtcatcgacaataatggcaatattgaagaaacccgccgccagctgctggacattttacaccagtgggatctgctggacaaaggtggctccggccaccatcatcaccatcactaatga

SEQ ID NO: 4720 - protein, 211 aa, synthetic construct
  REGION 1..211: note = Variant of 3'O-kinase
MAVTIGLTGGIAAGKSTVSAMMRELGLPVIDADEAARAVMKPGEEAYRDIVAEFGPGILRADGEIDRQKLGAIRFSDEQQRKVLNQIVGPAVLKKMLAEWEAHIGSGAKTVVLDIPLLFESGLQSWMDKVLVVYVDDDVQLRRLMARNGFTEEEALKRIRSQWPSAEKVKRADAVIDNNGNIEETRRQLLDILHQWDLLDKGGSGHHHHHH

SEQ ID NO: 4721 - DNA, 639 bp, synthetic construct
  misc_feature 1..639: note = Variant of 3'O-kinase
  source 1..639: mol_type = other DNA
atggcggttaccattggtttaacaggagggatcgcagcgggcaaatcgactgtgagtgccatgatgcgtgaactgggtctgccggtcatcgatgctgacgaggcagcacgcgccgttatgaagccaggcgaagaagcgtatcgcgacattgtagctgaattcgggccgggcatccttcgtgaggatggcgagatcgatcgccagaaactgggtgctatccgcttttcggacgaacaacaacgtaaggtgctgaattcgattgtaggtcctgcagtcctgaagaagatgctcgcggagtgggaagctcatatcgggtcaggcgccaagacggttgtgctggatatcccgctgctgttcgaatccggattgcaatcgtggatggacaaagttctcgtggtgtacgtcgatgatgatgttcagttacgccgccttatggcacgtaacgggtttactgaagaagaagctctgaagcgcattcgttcacagtggcccagtgcggagaaagttaaacgtgcagacgctgtcatcgacaataatggcaatattgaagaaacccgccgccagctgctggacattttacaccagtgggatctgctggacaaaggtggctccggccaccatcatcaccatcactaatga

SEQ ID NO: 4722 - protein, 211 aa, synthetic construct
  REGION 1..211: note = Variant of 3'O-kinase
MAVTIGLTGGIAAGKSTVSAMMRELGLPVIDADEAARAVMKPGEEAYRDIVAEFGPGILREDGEIDRQKLGAIRFSDEQQRKVLNSIVGPAVLKKMLAEWEAHIGSGAKTVVLDIPLLFESGLQSWMDKVLVVYVDDDVQLRRLMARNGFTEEEALKRIRSQWPSAEKVKRADAVIDNNGNIEETRRQLLDILHQWDLLDKGGSGHHHHHH

SEQ ID NO: 4723 - DNA, 639 bp, synthetic construct
  misc_feature 1..639: note = Variant of 3'O-kinase
  source 1..639: mol_type = other DNA
atggcggttaccattggtttaacaggagggatcgcagcgggcaaatcgactgtgagtgccatgatgcgtgaactgggtctgccggtcatcgatgctgacgaggcagcacgcgccgttatgaagccaggcgaagaagcgtatcgcgacattgtagctgaattcgggccgggcatccttcgtgcggatggcgagatcgatcgccagaaactgggtgctatccgcttttcggacgaacaacaacgtaaggtgctgaattcgattgtaggtcctgcagtcctgaagaagatgctcgcggagtgggaagctcatatcgggtcaggcgccaagacggttgtgctggatatcccgctgctgttcgaatccggattgcaatcgtggatggacaaagttctcgtggtgtacgtcgatgatgatgttcagttacgccgccttatggcacgtaacgggtttactgaagaagaagctctgaagcgcattcgttcacagtggcccagtgcggagaaagttaaacgtgcagacgctgtcatcgacaataatggcaatattgaagaaacccgccgccagctgctggacattttacacaagtgggatctgctggacaaaggtggctccggccaccatcatcaccatcactaatga

SEQ ID NO: 4724 - protein, 211 aa, synthetic construct
  REGION 1..211: note = Variant of 3'O-kinase
MAVTIGLTGGIAAGKSTVSAMMRELGLPVIDADEAARAVMKPGEEAYRDIVAEFGPGILRADGEIDRQKLGAIRFSDEQQRKVLNSIVGPAVLKKMLAEWEAHIGSGAKTVVLDIPLLFESGLQSWMDKVLVVYVDDDVQLRRLMARNGFTEEEALKRIRSQWPSAEKVKRADAVIDNNGNIEETRRQLLDILHKWDLLDKGGSGHHHHHH

SEQ ID NO: 4725 - DNA, 639 bp, synthetic construct
  misc_feature 1..639: note = Variant of 3'O-kinase
  source 1..639: mol_type = other DNA
atggcggttaccattggtttaacaggagggatcgcagcgggcaaatcgactgtgactgccatgatgcgtgaactgggtctgccggtcatcgatgctgacgaggcagcacgcgccgttatgaagccaggcgaagaagcgtatcgcgacattgtagctgaattcgggccgggcatccttcgtgcggatggcgagatcgatcgccagaaactgggtgctatccgcttttcggacgaacaacaacgtaaggtgctgaattcgattgtaggtcctgcagtcctgaagaagatgctcgcggagtgggaagctcatatcgggtcaggcgccaagacggttgtgctggatatcccgctgctgttcgaatccggattgcaatcgtggatggacaaagttctcgtggtgtacgtcgatgatgatgttcagttacgccgccttatggcacgtaacgggtttactgaagaagaagctctgaagcgcattcgttcacagtggcccagtgcggagaaagttaaacgtgcagacgctgtcatcgacaataatggcaatattgaagaaacccgccgccagctgctggacattttacaccagtgggatctgctggacaaaggtggctccggccaccatcatcaccatcactaatga

SEQ ID NO: 4726 - protein, 211 aa, synthetic construct
  REGION 1..211: note = Variant of 3'O-kinase
MAVTIGLTGGIAAGKSTVTAMMRELGLPVIDADEAARAVMKPGEEAYRDIVAEFGPGILRADGEIDRQKLGAIRFSDEQQRKVLNSIVGPAVLKKMLAEWEAHIGSGAKTVVLDIPLLFESGLQSWMDKVLVVYVDDDVQLRRLMARNGFTEEEALKRIRSQWPSAEKVKRADAVIDNNGNIEETRRQLLDILHQWDLLDKGGSGHHHHHH

SEQ ID NO: 4727 - DNA, 639 bp, synthetic construct
  misc_feature 1..639: note = Variant of 3'O-kinase
  source 1..639: mol_type = other DNA
atggcggttaccattggtttaacaggagggatcgcagcgggcaaatcgactgtgagtgccatgatgcgtgaactgggtctgccggtcatcgatgctgacgagtgtgcacgcgccgttatgaagccaggcgaagaagcgtatcgcgacattgtagctgaattcgggccgggcatccttcgtgcggatggcgagatcgatcgccagaaactgggtgctatccgcttttcggacgaacaacaacgtaaggtgctgaattcgattgtaggtcctgcagtcctgaagaagatgctcgcggagtgggaagctcatatcgggtcaggcgccaagacggttgtgctggatatcccgctgctgttcgaatccggattgcaatcgtggatggacaaagttctcgtggtgtacgtcgatgatgatgttcagttacgccgccttatggcacgtaacgggtttactgaagaagaagctctgaagcgcattcgttcacagtggcccagtgcggagaaagttaaacgtgcagacgctgtcatcgacaataatggcaatattgaagaaacccgccgccagctgctggacattttacaccagtgggatctgctggacaaaggtggctccggccaccatcatcaccatcactaatga

SEQ ID NO: 4728 - protein, 211 aa, synthetic construct
  REGION 1..211: note = Variant of 3'O-kinase
MAVTIGLTGGIAAGKSTVSAMMRELGLPVIDADECARAVMKPGEEAYRDIVAEFGPGILRADGEIDRQKLGAIRFSDEQQRKVLNSIVGPAVLKKMLAEWEAHIGSGAKTVVLDIPLLFESGLQSWMDKVLVVYVDDDVQLRRLMARNGFTEEEALKRIRSQWPSAEKVKRADAVIDNNGNIEETRRQLLDILHQWDLLDKGGSGHHHHHH

SEQ ID NO: 4729 - DNA, 639 bp, synthetic construct
  misc_feature 1..639: note = Variant of 3'O-kinase
  source 1..639: mol_type = other DNA
atggcggttaccattggtttaacaggagggatcgcagcgggcaaatcgactgtgagtgccatgatgcgtgaactgggtctgccggtcatcgatgctgacgaggcagcacgcgccgttatgaagccaggcgaagaagcgtatcgcgacattgtagctaagttcgggccgggcatccttcgtgcggatggcgagatcgatcgccagaaactgggtgctatccgcttttcggacgaacaacaacgtaaggtgctgaattcgattgtaggtcctgcagtcctgaagaagatgctcgcggagtgggaagctcatatcgggtcaggcgccaagacggttgtgctggatatcccgctgctgttcgaatccggattgcaatcgtggatggacaaagttctcgtggtgtacgtcgatgatgatgttcagttacgccgccttatggcacgtaacgggtttactgaagaagaagctctgaagcgcattcgttcacagtggcccagtgcggagaaagttaaacgtgcagacgctgtcatcgacaataatggcaatattgaagaaacccgccgccagctgctggacattttacaccagtgggatctgctggacaaaggtggctccggccaccatcatcaccatcactaatga

SEQ ID NO: 4730 - protein, 211 aa, synthetic construct
  REGION 1..211: note = Variant of 3'O-kinase
MAVTIGLTGGIAAGKSTVSAMMRELGLPVIDADEAARAVMKPGEEAYRDIVAKFGPGILRADGEIDRQKLGAIRFSDEQQRKVLNSIVGPAVLKKMLAEWEAHIGSGAKTVVLDIPLLFESGLQSWMDKVLVVYVDDDVQLRRLMARNGFTEEEALKRIRSQWPSAEKVKRADAVIDNNGNIEETRRQLLDILHQWDLLDKGGSGHHHHHH

SEQ ID NO: 4731 - DNA, 639 bp, synthetic construct
  misc_feature 1..639: note = Variant of 3'O-kinase
  source 1..639: mol_type = other DNA
atggcggttaccattggtttaacaggagggatcgcagcgggcaaatcgactgtgagtgccatgatgcgtgaactgggtctgccggtcatcgatgctgacgaggcagcacgcgccgttatgaagccaggcgaagaagcgtatcgcgacattgtagctgaattcgggccgggcatccttcgtgcggatggcgagatcgatcgccagaaactgggtgctatccgcttttcggaccctcaacaacgtaaggtgctgaattcgattgtaggtcctgcagtcctgaagaagatgctcgcggagtgggaagctcatatcgggtcaggcgccaagacggttgtgctggatatcccgctgctgttcgaatccggattgcaatcgtggatggacaaagttctcgtggtgtacgtcgatgatgatgttcagttacgccgccttatggcacgtaacgggtttactgaagaagaagctctgaagcgcattcgttcacagtggcccagtgcggagaaagttaaacgtgcagacgctgtcatcgacaataatggcaatattgaagaaacccgccgccagctgctggacattttacaccagtgggatctgctggacaaaggtggctccggccaccatcatcaccatcactaatga

SEQ ID NO: 4732 - protein, 211 aa, synthetic construct
  REGION 1..211: note = Variant of 3'O-kinase
MAVTIGLTGGIAAGKSTVSAMMRELGLPVIDADEAARAVMKPGEEAYRDIVAEFGPGILRADGEIDRQKLGAIRFSDPQQRKVLNSIVGPAVLKKMLAEWEAHIGSGAKTVVLDIPLLFESGLQSWMDKVLVVYVDDDVQLRRLMARNGFTEEEALKRIRSQWPSAEKVKRADAVIDNNGNIEETRRQLLDILHQWDLLDKGGSGHHHHHH

SEQ ID NO: 4733 - DNA, 639 bp, synthetic construct
  misc_feature 1..639: note = Variant of 3'O-kinase
  source 1..639: mol_type = other DNA
atggcggttaccattggtttaacaggagggatcgcagcgggcaaatcgactgtgagtgccatgatgcgtgaactgggtctgccggtcatcgatgctgacgaggcagcacgcgccgttatgaagccaggcgaagaagcgtatcgcgacattgtagctgaattcgggccgggcatccttcgtgcggatggcgagatcgatcgccagaaactgggtgctatccgcttttcggacgaacaacaacgtaaggtgctgaattcgattgtaggtcctgcagtcctgaagaagatgctcgcggagtgggaagctcatatcgggtcaggcgccaagacggttgtgctggatatcccgctgctgttcgaatccggattgcaatcgtggatggacaaagttctcgtggtgtacgtcgatgatgatgttcagttacgccgccttatggcacgtaacgggtttactgaagaagaagctctgaagcgcattcgttcacagtggcccagtgcggagaaagttaaacgtgcagacgctgtcatcgacaataatggcaatattgaagaaacccgccgccagctgctggacattttacacgcgtgggatctgctggacaaaggtggctccggccaccatcatcaccatcactaatga

SEQ ID NO: 4734 - protein, 211 aa, synthetic construct
  REGION 1..211: note = Variant of 3'O-kinase
MAVTIGLTGGIAAGKSTVSAMMRELGLPVIDADEAARAVMKPGEEAYRDIVAEFGPGILRADGEIDRQKLGAIRFSDEQQRKVLNSIVGPAVLKKMLAEWEAHIGSGAKTVVLDIPLLFESGLQSWMDKVLVVYVDDDVQLRRLMARNGFTEEEALKRIRSQWPSAEKVKRADAVIDNNGNIEETRRQLLDILHAWDLLDKGGSGHHHHHH

SEQ ID NO: 4735 - DNA, 639 bp, synthetic construct
  misc_feature 1..639: note = Variant of 3'O-kinase
  source 1..639: mol_type = other DNA
atggcggttaccattggtttaacaggagggatcgcagcgggcaaatcgactgtgagtgccatgatgcgtgaactgggtctgccggtcatcgatgctgacgaggcagcacgcgccgttatgaagccaggcgaacaggcgtatcgcgacattgtagctgaattcgggccgggcatccttcgtgcggatggcgagatcgatcgccagaaactgggtgctatccgcttttcggacgaacaacaacgtaaggtgctgaattcgattgtaggtcctgcagtcctgaagaagatgctcgcggagtgggaagctcatatcgggtcaggcgccaagacggttgtgctggatatcccgctgctgttcgaatccggattgcaatcgtggatggacaaagttctcgtggtgtacgtcgatgatgatgttcagttacgccgccttatggcacgtaacgggtttactgaagaagaagctctgaagcgcattcgttcacagtggcccagtgcggagaaagttaaacgtgcagacgctgtcatcgacaataatggcaatattgaagaaacccgccgccagctgctggacattttacaccagtgggatctgctggacaaaggtggctccggccaccatcatcaccatcactaatga

SEQ ID NO: 4736 - protein, 211 aa, synthetic construct
  REGION 1..211: note = Variant of 3'O-kinase
MAVTIGLTGGIAAGKSTVSAMMRELGLPVIDADEAARAVMKPGEQAYRDIVAEFGPGILRADGEIDRQKLGAIRFSDEQQRKVLNSIVGPAVLKKMLAEWEAHIGSGAKTVVLDIPLLFESGLQSWMDKVLVVYVDDDVQLRRLMARNGFTEEEALKRIRSQWPSAEKVKRADAVIDNNGNIEETRRQLLDILHQWDLLDKGGSGHHHHHH

SEQ ID NO: 4737 - DNA, 639 bp, synthetic construct
  misc_feature 1..639: note = Variant of 3'O-kinase
  source 1..639: mol_type = other DNA
atggcggttaccattggtttaacaggagggatcgcagcgggcaaatcgactgtgagtgccatgatgcgtgaactgggtctgccggtcatcgatgctgacgaggcagcacgcgccgttatgaagccaggcgaagaagcgtatcgcgacattgtagctgaattcgggccgggcatccttcgtgcggatggcgagatcgatcgccagaaactgggtgctatccgcttttcggacgaacaacaacgtaaggtgctgaattcgattgtaggtcctgcagtcctgaagaagatgctcgcggagtgggaagctcatatcgggtcaggcgccaagacggttgtgctggatatcccgctgctgttcgaatccggattgcaatcgtggatggacaaagttctcgtggtgtacgtcgatgatgatgttcagttacgccgccttatggcacgtaacgggtttactgaagaagaagctctgaagcgcattcgttcacagtggcccagtgcggagaaagttaaacgtgcagacgctgtcatcgacaataatggcaatattgaagaaacccgccgccagctgctggacattttagcgcagtgggatctgctggacaaaggtggctccggccaccatcatcaccatcactaatga

SEQ ID NO: 4738 - protein, 211 aa, synthetic construct
  REGION 1..211: note = Variant of 3'O-kinase
MAVTIGLTGGIAAGKSTVSAMMRELGLPVIDADEAARAVMKPGEEAYRDIVAEFGPGILRADGEIDRQKLGAIRFSDEQQRKVLNSIVGPAVLKKMLAEWEAHIGSGAKTVVLDIPLLFESGLQSWMDKVLVVYVDDDVQLRRLMARNGFTEEEALKRIRSQWPSAEKVKRADAVIDNNGNIEETRRQLLDILAQWDLLDKGGSGHHHHHH

SEQ ID NO: 4739 - DNA, 639 bp, synthetic construct
  misc_feature 1..639: note = Variant of 3'O-kinase
  source 1..639: mol_type = other DNA
atggcggttaccattggtttaacaggagggatcgcagcgggcaaatcgactgtgagtgccatgatgcgtgaactgggtctgccggtcatcgatgctgacgaggcagcacgcgccgttatgaagccaggcgaagaagcgtatcgcgacattgtagctgaattcgggccgggcatccttcgtgcggatggcgagatcgatcgccagaaactgggtgctatccgcttttcggacgaacaacaacgtaaggtgctgaattcgattgtaggtcctgcagtcctgaagaagatgctcgcggagtgggaagctcatatcgggtcaggcgccaagacggttgtgctggatatcccgctgctgttcgaatccggattgcaatcgtggatggacaaagttctcgtggtgtacgtcgatgatgatgttcagttacgccgccttatggcacgtaacgggtttactgaagaagaagctctgaagcgcattcgttcacagtggcccagtgcggagaaagtttgtcgtgcagacgctgtcatcgacaataatggcaatattgaagaaacccgccgccagctgctggacattttacaccagtgggatctgctggacaaaggtggctccggccaccatcatcaccatcactaatga

SEQ ID NO: 4740 - protein, 211 aa, synthetic construct
  REGION 1..211: note = Variant of 3'O-kinase
MAVTIGLTGGIAAGKSTVSAMMRELGLPVIDADEAARAVMKPGEEAYRDIVAEFGPGILRADGEIDRQKLGAIRFSDEQQRKVLNSIVGPAVLKKMLAEWEAHIGSGAKTVVLDIPLLFESGLQSWMDKVLVVYVDDDVQLRRLMARNGFTEEEALKRIRSQWPSAEKVCRADAVIDNNGNIEETRRQLLDILHQWDLLDKGGSGHHHHHH

SEQ ID NO: 4741 - DNA, 639 bp, synthetic construct
  misc_feature 1..639: note = Variant of 3'O-kinase
  source 1..639: mol_type = other DNA
atggcggttaccattggtttaacaggagggatcgcagcgggcaaatcgactgtgagtgccatgatgcgtgaactgggtctgccggtcatcgatgctgacgaggcagcacgcgccgttatgaagccaggcgaagaagcgtatggggacattgtagctgaattcgggccgggcatccttcgtgcggatggcgagatcgatcgccagaaactaggtgctatccgcttttcggacgaacaacaacgtaaggtgctgaattcgattgtaggtcctgcagtcctgaagaagatgctcgcggagtgggaagctcatatcgggtcaggcgccaagacggttgtgctggatatcccgctgctgttcgaatccggattgcaatcgtggatggacaaagttctcgtggtgtacgtcgatgatgatgttcagttacgccgccttatggcacgtaacgggtttactgaagaagaagctctgaagcgcattcgttcacagtggcccagtgcggagaaagttaaacgtgcagacgctgtcatcgacaataatggcaatattgaagaaacccgccgccagctgctggacattttacaccagtgggatctgctggacaaaggtggctccggccaccatcatcaccatcactaatga

SEQ ID NO: 4742 - protein, 211 aa, synthetic construct
  REGION 1..211: note = Variant of 3'O-kinase
MAVTIGLTGGIAAGKSTVSAMMRELGLPVIDADEAARAVMKPGEEAYGDIVAEFGPGILRADGEIDRQKLGAIRFSDEQQRKVLNSIVGPAVLKKMLAEWEAHIGSGAKTVVLDIPLLFESGLQSWMDKVLVVYVDDDVQLRRLMARNGFTEEEALKRIRSQWPSAEKVKRADAVIDNNGNIEETRRQLLDILHQWDLLDKGGSGHHHHHH

SEQ ID NO: 4743 - DNA, 639 bp, synthetic construct
  misc_feature 1..639: note = Variant of 3'O-kinase
  source 1..639: mol_type = other DNA
atggcggttaccattggtttaacaggagggatcgcagcgggcaaatcgactgtgagtgccatgatgcgtgaactgggtctgccggtcatcgatgctgacgaggcagcacgcgccgttatgaagccaggcgaagaagcgtataaggacattgtagctgaattcgggccgggcatccttcgtgcggatggcgagatcgatcgccagaaactgggtgctatccgcttttcggacgaacaacaacgtaaggtgctgaattcgattgtaggtcctgcagtcctgaagaagatgctcgcggagtgggaagctcatatcgggtcaggcgccaagacggttgtgctggatatcccgctgctgttcgaatccggattgcaatcgtggatggacaaagttctcgtggtgtacgtcgatgatgatgttcagttacgccgccttatggcacgtaacgggtttactgaagaagaagctctgaagcgcattcgttcacagtggcccagtgcggagaaagttaaacgtgcagacgctgtcatcgacaataatggcaatattgaagaaacccgccgccagctgctggacattttacaccagtgggatctgctggacaaaggtggctccggccaccatcatcaccatcactaatga

SEQ ID NO: 4744 - protein, 211 aa, synthetic construct
  REGION 1..211: note = Variant of 3'O-kinase
MAVTIGLTGGIAAGKSTVSAMMRELGLPVIDADEAARAVMKPGEEAYKDIVAEFGPGILRADGEIDRQKLGAIRFSDEQQRKVLNSIVGPAVLKKMLAEWEAHIGSGAKTVVLDIPLLFESGLQSWMDKVLVVYVDDDVQLRRLMARNGFTEEEALKRIRSQWPSAEKVKRADAVIDNNGNIEETRRQLLDILHQWDLLDKGGSGHHHHHH

SEQ ID NO: 4745 - DNA, 639 bp, synthetic construct
  misc_feature 1..639: note = Variant of 3'O-kinase
  source 1..639: mol_type = other DNA
atggcggttaccattggtttaacaggagggatcgcagcgggcaaatcgactgtgagtgccatgatgcgtgaactgggtctgccggtcatcgatgctgacgaggcagcacgcgccgttatgaagccaggcgaagaagcgtatcgcgacattgtagctgaattcgggccgggcatccttcgtgcggatggcgagatcgatcgccagaaactgggtgctatccgcttttcggacgaacaacaacgtaaggtgctgaattcgattgtaggtcctgcagtcctgaagaagatgctcgcggagtgggaagctcatatcgggtcaggcgccaagacggttgtgctggatatcccgctgctgttcgaatccggattgcaatcgtggatggacaaagttctcgtggtgtacgtcgatgatgatgttcagttacgccgccttatggcacgtaacgggtttactgaagaagaagctctgaagcgcattcgttcacagtggcccagtgcggagaaagttaaaatggcagacgctgtcatcgacaataatggcaatattgaagaaacccgccgccagctgctggacattttacaccagtgggatctgctggacaaaggtggctccggccaccatcatcaccatcactaatga

SEQ ID NO: 4746 - protein, 211 aa, synthetic construct
  REGION 1..211: note = Variant of 3'O-kinase
MAVTIGLTGGIAAGKSTVSAMMRELGLPVIDADEAARAVMKPGEEAYRDIVAEFGPGILRADGEIDRQKLGAIRFSDEQQRKVLNSIVGPAVLKKMLAEWEAHIGSGAKTVVLDIPLLFESGLQSWMDKVLVVYVDDDVQLRRLMARNGFTEEEALKRIRSQWPSAEKVKMADAVIDNNGNIEETRRQLLDILHQWDLLDKGGSGHHHHHH

SEQ ID NO: 4747 - DNA, 639 bp, synthetic construct
  misc_feature 1..639: note = Variant of 3'O-kinase
  source 1..639: mol_type = other DNA
atggcggttaccattggtttaacaggagggatcgcagcgggcaaatcgactgtgagtgccatgatgcgtgaactgggtctgccggtcatcgatgctgacgaggcagcacgcgccgttatgaagccaggcgaagaagcgtatcgcgacattgtagctgaattcgggccgggcatccttcgtgcggatggcgagatcgatcgccagaaactgggtgctatccgcttttcggacgaacaacaacgtaagacgctgaattcgattgtaggtcctgcagtcctgaagaagatgctcgcggagtgggaagctcatatcgggtcaggcgccaagacggttgtgctggatatcccgctgctgttcgaatccggattgcaatcgtggatggacaaagttctcgtggtgtacgtcgatgatgatgttcagttacgccgccttatggcacgtaacgggtttactgaagaagaagctctgaagcgcattcgttcacagtggcccagtgcggagaaagttaaacgtgcagacgctgtcatcgacaataatggcaatattgaagaaacccgccgccagctgctggacattttacaccagtgggatctgctggacaaaggtggctccggccaccatcatcaccatcactaatga

SEQ ID NO: 4748 - protein, 211 aa, synthetic construct
  REGION 1..211: note = Variant of 3'O-kinase
MAVTIGLTGGIAAGKSTVSAMMRELGLPVIDADEAARAVMKPGEEAYRDIVAEFGPGILRADGEIDRQKLGAIRFSDEQQRKTLNSIVGPAVLKKMLAEWEAHIGSGAKTVVLDIPLLFESGLQSWMDKVLVVYVDDDVQLRRLMARNGFTEEEALKRIRSQWPSAEKVKRADAVIDNNGNIEETRRQLLDILHQWDLLDKGGSGHHHHHH

SEQ ID NO: 4749 - DNA, 639 bp, synthetic construct
  misc_feature 1..639: note = Variant of 3'O-kinase
  source 1..639: mol_type = other DNA
atggcggttaccattggtttaacaggagggatcgcagcgggcaaatcgactgtgagtgccatgatgcgtgaactgggtctgccggtcatcgatgctgacgaggcagcacgcgccgttatgaagccaggcgaagaagcgtatcgcgacattgtagctgaattcgggccgggcatccttcgtgcggatggcgagatcgatcgccagaaactgggtgctatccgcttttcggacgaacaacaacgtaaggtgctgaattcgattgtaggtcctgcagtcctgaagaagatgctcgcggagtgggaagctcatatcgggtcaggcgccaagacggttgtgctggatatcccgctgctgttcgaatccggattgcaatcgtggatggacaaagttctcgtggtgtacgtcgatgatgatgttcagttacgccgccttatggcacgtaacgggtttactgaagaagaagctctgaagcgcattcgttcacagtggcccagtgcggagaaagttaaagcggcagacgctgtcatcgacaataatggcaatattgaagaaacccgccgccagctgctggacattttacaccagtgggatctgctggacaaaggtggctccggccaccatcatcaccatcactaatga

SEQ ID NO: 4750 - protein, 211 aa, synthetic construct
  REGION 1..211: note = Variant of 3'O-kinase
MAVTIGLTGGIAAGKSTVSAMMRELGLPVIDADEAARAVMKPGEEAYRDIVAEFGPGILRADGEIDRQKLGAIRFSDEQQRKVLNSIVGPAVLKKMLAEWEAHIGSGAKTVVLDIPLLFESGLQSWMDKVLVVYVDDDVQLRRLMARNGFTEEEALKRIRSQWPSAEKVKAADAVIDNNGNIEETRRQLLDILHQWDLLDKGGSGHHHHHH

SEQ ID NO: 4751 - DNA, 639 bp, synthetic construct
  misc_feature 1..639: note = Variant of 3'O-kinase
  source 1..639: mol_type = other DNA
atggcggttaccattggtttaacaggagggatcgcagcgggcaaatcgactgtgagtgccatgatgcgtgaactgggtctgccggtcatcgatgctgacgaggcagcacgcgccgttatgaagccaggcgaagaagcgtatcgcgacattgtagctgaattcgggccgggcatccttcgtgcggatggcgagatcgatcgccagaaactgggtgctatccgcttttcggacgaacaacaacgtaaggtgctgaattcgattgtaggtcctgcagtcctgaagaagatgctcgcggagtgggaagctcatatcgggtcaggcgccaagacggttgtgctggatatcccgctgctgttcgaaacgggattgcaatcgtggatggacaaagttctcgtggtgtacgtcgatgatgatgttcagttacgccgccttatggcacgtaacgggtttactgaagaagaagctctgaagcgcattcgttcacagtggcccagtgcggagaaagttaaacgtgcagacgctgtcatcgacaataatggcaatattgaagaaacccgccgccagctgctggacattttacaccagtgggatctgctggacaaaggtggctccggccaccatcatcaccatcactaatga

SEQ ID NO: 4752 - protein, 211 aa, synthetic construct
  REGION 1..211: note = Variant of 3'O-kinase
MAVTIGLTGGIAAGKSTVSAMMRELGLPVIDADEAARAVMKPGEEAYRDIVAEFGPGILRADGEIDRQKLGAIRFSDEQQRKVLNSIVGPAVLKKMLAEWEAHIGSGAKTVVLDIPLLFETGLQSWMDKVLVVYVDDDVQLRRLMARNGFTEEEALKRIRSQWPSAEKVKRADAVIDNNGNIEETRRQLLDILHQWDLLDKGGSGHHHHHH

SEQ ID NO: 4753 - DNA, 639 bp, synthetic construct
  misc_feature 1..639: note = Variant of 3'O-kinase
  source 1..639: mol_type = other DNA
atggcggttaccattggtttaacaggagggatcgcagcgggcaaatcgactgtgagtgccatgatgcgtgaactgggtctgccggtcatcgatgctgacgaggcagcacgcgccgttatgaagccaggcgaagaagcgtatcgcgacattgtagctgaattcgggccgggcatccttcgtgcggatggcgagatcgatcgccagaaactgggtgctatccgcttttcggacgaacaagggcgtaaggtgctgaattcgattgtaggtcctgcagtcctgaagaagatgctcgcggagtgggaagctcatatcgggtcaggcgccaagacggttgtgctggatatcccgctgctgttcgaatccggattgcaatcgtggatggacaaagttctcgtggtgtacgtcgatgatgatgttcagttacgccgccttatggcacgtaacgggtttactgaagaagaagctctgaagcgcattcgttcacagtggcccagtgcggagaaagttaaacgtgcagacgctgtcatcgacaataatggcaatattgaagaaacccgccgccagctgctggacattttacaccagtgggatctgctggacaaaggtggctccggccaccatcatcaccatcactaatga

SEQ ID NO: 4754 - protein, 211 aa, synthetic construct
  REGION 1..211: note = Variant of 3'O-kinase
MAVTIGLTGGIAAGKSTVSAMMRELGLPVIDADEAARAVMKPGEEAYRDIVAEFGPGILRADGEIDRQKLGAIRFSDEQGRKVLNSIVGPAVLKKMLAEWEAHIGSGAKTVVLDIPLLFESGLQSWMDKVLVVYVDDDVQLRRLMARNGFTEEEALKRIRSQWPSAEKVKRADAVIDNNGNIEETRRQLLDILHQWDLLDKGGSGHHHHHH

SEQ ID NO: 4755 - DNA, 639 bp, synthetic construct
  misc_feature 1..639: note = Variant of 3'O-kinase
  source 1..639: mol_type = other DNA
atggcggttaccattggtttaacaggagggatcgcagcgggcaaatcgactgtgagtgccatgatgcgtgaactgggtctgccggtcatcgatgctgacgaggcagcacgcgccgttatgaagccaggcgaagaagcgtatcgcgacattgtagctgaattcgggccgggcatccttcgtgcggatggcgagatcgatcgccagaaactgggtgctatccgcttttcggacgaacaacaacgtaaggtgctgaattcgattgtaggtcctgcagtcctgaagaagatgctcgcggagtgggaagctcatatcgggtcaggcgccaagacggttgtgctggatatcccgctgctgttcgaatccggattgcaatcgtggatggacaaagttctcgtggtgtacgtcgatgatgatgttcagttacgccgccttatggcacgtaacgggtttactgaagaagaagctctgaagcgcattcgttcacagtggcccagtgcggagaaagttattcgtgcagacgctgtcatcgacaataatggcaatattgaagaaacccgccgccagctgctggacattttacaccagtgggatctgctggacaaaggtggctccggccaccatcatcaccatcactaatga

SEQ ID NO: 4756 - protein, 211 aa, synthetic construct
  REGION 1..211: note = Variant of 3'O-kinase
MAVTIGLTGGIAAGKSTVSAMMRELGLPVIDADEAARAVMKPGEEAYRDIVAEFGPGILRADGEIDRQKLGAIRFSDEQQRKVLNSIVGPAVLKKMLAEWEAHIGSGAKTVVLDIPLLFESGLQSWMDKVLVVYVDDDVQLRRLMARNGFTEEEALKRIRSQWPSAEKVIRADAVIDNNGNIEETRRQLLDILHQWDLLDKGGSGHHHHHH

SEQ ID NO: 4757 - DNA, 639 bp, synthetic construct
  misc_feature 1..639: note = Variant of 3'O-kinase
  source 1..639: mol_type = other DNA
atggcggttaccattggtttaacaggagggatcgcagcgggcaaatcgactgtgagtgccatgatgcgtgaactgggtctgccggtcatcgatgctgacgaggcagcacgcgccgttatgaagccaggcgaagaagcgtatcgctctattgtagctgaattcgggccgggcatccttcgtgcggatggcgagatcgatcgccagaaactgggtgctatccgcttttcggacgaacaacaacgtaaggtgctgaattcgattgtaggtcctgcagtcctgaagaagatgctcgcggagtgggaagctcatatcgggtcaggcgccaagacggttgtgctggatatcccgctgctgttcgaatccggattgcaatcgtggatggacaaagttctcgtggtgtacgtcgatgatgatgttcagttacgccgccttatggcacgtaacgggtttactgaagaagaagctctgaagcgcattcgttcacagtggcccagtgcggagaaagttaaacgtgcagacgctgtcatcgacaataatggcaatattgaagaaacccgccgccagctgctggacattttacaccagtgggatctgctggacaaaggtggctccggccaccatcatcaccatcactaatga

SEQ ID NO: 4758 - protein, 211 aa, synthetic construct
  REGION 1..211: note = Variant of 3'O-kinase
MAVTIGLTGGIAAGKSTVSAMMRELGLPVIDADEAARAVMKPGEEAYRSIVAEFGPGILRADGEIDRQKLGAIRFSDEQQRKVLNSIVGPAVLKKMLAEWEAHIGSGAKTVVLDIPLLFESGLQSWMDKVLVVYVDDDVQLRRLMARNGFTEEEALKRIRSQWPSAEKVKRADAVIDNNGNIEETRRQLLDILHQWDLLDKGGSGHHHHHH

SEQ ID NO: 4759 - DNA, 639 bp, synthetic construct
  misc_feature 1..639: note = Variant of 3'O-kinase
  source 1..639: mol_type = other DNA
atggcggttaccattggtttaacaggagggatcgcagcgggcaaatcgactgtgagtgccatgatgcgtgaactgggtctgccggtcatcgatgctgacgaggcagcacgcgccgttatgaagccaggcgaagaagcgtatcgcgacattgtagctgaattcgggccgggcatccttcgtgcggatggcgagatcgatcgccagaaactgggtgctatccgcttttcggacgaacaacaacgtaaggtgctgaattcgattgtaggtcctgcagtcctgaagaagatgctcgcggagtgggaagctcatatcgggtcaggcgccaagacggttgtgctggatatcccgctgctgttcgaatccggattgcaatcgtggatggacaaagttctcgtggtgtacgtcgatgatgatgttcagttacgccgccttatggcacgtaacgggtttactgaagaagaagctctgaagcgcattcgttcacagtggcccagtgcggagaaagttactcgtgcagacgctgtcatcgacaataatggcaatattgaagaaacccgccgccagctgctggacattttacaccagtgggatctgctggacaaaggtggctccggccaccatcatcaccatcactaatga

SEQ ID NO: 4760 - protein, 211 aa, synthetic construct
  REGION 1..211: note = Variant of 3'O-kinase
MAVTIGLTGGIAAGKSTVSAMMRELGLPVIDADEAARAVMKPGEEAYRDIVAEFGPGILRADGEIDRQKLGAIRFSDEQQRKVLNSIVGPAVLKKMLAEWEAHIGSGAKTVVLDIPLLFESGLQSWMDKVLVVYVDDDVQLRRLMARNGFTEEEALKRIRSQWPSAEKVTRADAVIDNNGNIEETRRQLLDILHQWDLLDKGGSGHHHHHH

SEQ ID NO: 4761 - DNA, 639 bp, synthetic construct
  misc_feature 1..639: note = Variant of 3'O-kinase
  source 1..639: mol_type = other DNA
atggcggttaccattggtttaacaggagggatcgcagcgggcaaatcgactgtgagtgccatgatgcgtgaactgggtctgccggtcatcgatgctgacgaggcagcacgcgccgttatgaagccaggcgaagaagcgtatcgcgacattgtagctgaattcgggccgggcatccttcgtgcggatggcgagatcgatcgccagaaactgggtgctatccgcttttcggacgaacaacaacgtaaggtgctgaattcgattgtaggtcctgcagtcctgaagaagatgctcgcggagtgggaagctcatatcgggcggggcgccaagacggttgtgctggatatcccgctgctgttcgaatccggattgcaatcgtggatggacaaagttctcgtggtgtacgtcgatgatgatgttcagttacgccgccttatggcacgtaacgggtttactgaagaagaagctctgaagcgcattcgttcacagtggcccagtgcggagaaagttaaacgtgcagacgctgtcatcgacaataatggcaatattgaagaaacccgccgccagctgctggacattttacaccagtgggatctgctggacaaaggtggctccggccaccatcatcaccatcactaatga

SEQ ID NO: 4762 - protein, 211 aa, synthetic construct
  REGION 1..211: note = Variant of 3'O-kinase
MAVTIGLTGGIAAGKSTVSAMMRELGLPVIDADEAARAVMKPGEEAYRDIVAEFGPGILRADGEIDRQKLGAIRFSDEQQRKVLNSIVGPAVLKKMLAEWEAHIGRGAKTVVLDIPLLFESGLQSWMDKVLVVYVDDDVQLRRLMARNGFTEEEALKRIRSQWPSAEKVKRADAVIDNNGNIEETRRQLLDILHQWDLLDKGGSGHHHHHH

SEQ ID NO: 4763 - DNA, 639 bp, synthetic construct
  misc_feature 1..639: note = Variant of 3'O-kinase
  source 1..639: mol_type = other DNA
atggcggttaccattggtttaacaggagggatcgcagcgggcaaatcgactgtgagtgccatgatgcgtgaactgggtctgccggtcatcgatgctgacgaggcagcacgcgccgttatgaagccaggcgaagaagcgtatcgcgacattgtagctgaattcgggccgggcatccttcgtgcggatggcgagatcgatcgccagaaactgggtgctatccgcttttcggacgaacaacaacgtaaggtgctgtggtcgattgtaggtcctgcagtcctgaagaagatgctcgcggagtgggaagctcatatcgggtcaggcgccaagacggttgtgctggatatcccgctgctgttcgaatccggattgcaatcgtggatggacaaagttctcgtggtgtacgtcgatgatgatgttcagttacgccgccttatggcacgtaacgggtttactgaagaagaagctctgaagcgcattcgttcacagtggcccagtgcggagaaagttaaacgtgcagacgctgtcatcgacaataatggcaatattgaagaaacccgccgccagctgctggacattttacaccagtgggatctgctggacaaaggtggctccggccaccatcatcaccatcactaatga

SEQ ID NO: 4764 - protein, 211 aa, synthetic construct
  REGION 1..211: note = Variant of 3'O-kinase
MAVTIGLTGGIAAGKSTVSAMMRELGLPVIDADEAARAVMKPGEEAYRDIVAEFGPGILRADGEIDRQKLGAIRFSDEQQRKVLWSIVGPAVLKKMLAEWEAHIGSGAKTVVLDIPLLFESGLQSWMDKVLVVYVDDDVQLRRLMARNGFTEEEALKRIRSQWPSAEKVKRADAVIDNNGNIEETRRQLLDILHQWDLLDKGGSGHHHHHH

SEQ ID NO: 4765 - DNA, 639 bp, synthetic construct
  misc_feature 1..639: note = Variant of 3'O-kinase
  source 1..639: mol_type = other DNA
atggcggttaccattggtttaacaggagggatcgcagcgggcaaatcgactgtgagtgccatgatgcgtgaactgggtctgccggtcatcgatgctgacgaggcagcacgcgccgttatgaagccaggcgaagaagcgtatcgcgacattgtaaaggaattcgggccgggcatccttcgtgcggatggcgagatcgatcgccagaaactgggtgctatccgcttttcggacgaacaacaacgtaaggtgctgaattcgattgtaggtcctgcagtcctgaagaagatgctcgcggagtgggaagctcatatcgggtcaggcgccaagacggttgtgctggatatcccgctgctgttcgaatccggattgcaatcgtggatggacaaagttctcgtggtgtacgtcgatgatgatgttcagttacgccgccttatggcacgtaacgggtttactgaagaagaagctctgaagcgcattcgttcacagtggcccagtgcggagaaagttaaacgtgcagacgctgtcatcgacaataatggcaatattgaagaaacccgccgccagctgctggacattttacaccagtgggatctgctggacaaaggtggctccggccaccatcatcaccatcactaatga

SEQ ID NO: 4766 - protein, 211 aa, synthetic construct
  REGION 1..211: note = Variant of 3'O-kinase
MAVTIGLTGGIAAGKSTVSAMMRELGLPVIDADEAARAVMKPGEEAYRDIVKEFGPGILRADGEIDRQKLGAIRFSDEQQRKVLNSIVGPAVLKKMLAEWEAHIGSGAKTVVLDIPLLFESGLQSWMDKVLVVYVDDDVQLRRLMARNGFTEEEALKRIRSQWPSAEKVKRADAVIDNNGNIEETRRQLLDILHQWDLLDKGGSGHHHHHH

SEQ ID NO: 4767 - DNA, 639 bp, synthetic construct
  misc_feature 1..639: note = Variant of 3'O-kinase
  source 1..639: mol_type = other DNA
atggcggttaccattggtttaacaggagggatcgcagcgggcaaatcgactgtgagtgccatgatgcgtgaactgggtctgccggtcatcgatgctgacgaggcagcacgcgccgttatgaagccaggcgaagaagcgtatcgcgacattgtagctgaattcgggccgggcatccttcgtgcggatggcgagatcgatcgccagaaactgggtgctatccgcttttcggacgaacaacaacgtaaggtgctgaattcgattgtaggtcctgcagtcctgaagaagatgctcggtgagtgggaagctcatatcgggtcaggcgccaagacggttgtgctggatatcccgctgctgttcgaatccggattgcaatcgtggatggacaaagttctcgtggtgtacgtcgatgatgatgttcagttacgccgccttatggcacgtaacgggtttactgaagaagaagctctgaagcgcattcgttcacagtggcccagtgcggagaaagttaaacgtgcagacgctgtcatcgacaataatggcaatattgaagaaacccgccgccagctgctggacattttacaccagtgggatctgctggacaaaggtggctccggccaccatcatcaccatcactaatga

SEQ ID NO: 4768 - protein, 211 aa, synthetic construct
  REGION 1..211: note = Variant of 3'O-kinase
MAVTIGLTGGIAAGKSTVSAMMRELGLPVIDADEAARAVMKPGEEAYRDIVAEFGPGILRADGEIDRQKLGAIRFSDEQQRKVLNSIVGPAVLKKMLGEWEAHIGSGAKTVVLDIPLLFESGLQSWMDKVLVVYVDDDVQLRRLMARNGFTEEEALKRIRSQWPSAEKVKRADAVIDNNGNIEETRRQLLDILHQWDLLDKGGSGHHHHHH

SEQ ID NO: 4769 - DNA, 639 bp, synthetic construct
  misc_feature 1..639: note = Variant of 3'O-kinase
  source 1..639: mol_type = other DNA
atggcggttaccattggtttaacaggagggatcgcagcgggcaaatcgactgtgagtgccatgatgcgtgaactgggtctgccggtcatcgatgctgacgaggcagcacgcgccgttatgaagccaggcgaagaagcgtatcgccgtattgtagctgaattcgggccgggcatccttcgtgcggatggcgagatcgatcgccagaaactgggtgctatccgcttttcggacgaacaacaacgtaaggtgctgaattcgattgtaggtcctgcagtcctgaagaagatgctcgcggagtgggaagctcatatcgggtcaggcgccaagacggttgtgctggatatcccgctgctgttcgaatccggattgcaatcgtggatggacaaagttctcgtggtgtacgtcgatgatgatgttcagttacgccgccttatggcacgtaacgggtttactgaagaagaagctctgaagcgcattcgttcacagtggcccagtgcggagaaagttaaacgtgcagacgctgtcatcgacaataatggcaatattgaagaaacccgccgccagctgctggacattttacaccagtgggatctgctggacaaaggtggctccggccaccatcatcaccatcactaatga

SEQ ID NO: 4770 - protein, 211 aa, synthetic construct
  REGION 1..211: note = Variant of 3'O-kinase
MAVTIGLTGGIAAGKSTVSAMMRELGLPVIDADEAARAVMKPGEEAYRRIVAEFGPGILRADGEIDRQKLGAIRFSDEQQRKVLNSIVGPAVLKKMLAEWEAHIGSGAKTVVLDIPLLFESGLQSWMDKVLVVYVDDDVQLRRLMARNGFTEEEALKRIRSQWPSAEKVKRADAVIDNNGNIEETRRQLLDILHQWDLLDKGGSGHHHHHH

SEQ ID NO: 4771 - DNA, 639 bp, synthetic construct
  misc_feature 1..639: note = Variant of 3'O-kinase
  source 1..639: mol_type = other DNA
atggcggttaccattggtttaacaggagggatcgcagcgggcaaatcgactgtgagtgccatgatgcgtgaactgggtctgccggtcatcgatgctgacgaggcagcacgcgccgttatgaagccaggcgaagaagcgtatcgcgacattgtagctgaattcgggccgggcatccttcgtgcggatggcgagatcgatcgccagaaactgggtgctatccgcttttcggacgaacaacaacgtaaggtgctgaattcgattgtaggtcctgcagtcctgaagaagatgctcgcggagtgggaagctcatatcgggtcaggcgccgcgacggttgtgctggatatcccgctgctgttcgaatccggattgcaatcgtggatggacaaagttctcgtggtgtacgtcgatgatgatgttcagttacgccgccttatggcacgtaacgggtttactgaagaagaagctctgaagcgcattcgttcacagtggcccagtgcggagaaagttaaacgtgcagacgctgtcatcgacaataatggcaatattgaagaaacccgccgccagctgctggacattttacaccagtgggatctgctggacaaaggtggctccggccaccatcatcaccatcactaatga

SEQ ID NO: 4772 - protein, 211 aa, synthetic construct
  REGION 1..211: note = Variant of 3'O-kinase
MAVTIGLTGGIAAGKSTVSAMMRELGLPVIDADEAARAVMKPGEEAYRDIVAEFGPGILRADGEIDRQKLGAIRFSDEQQRKVLNSIVGPAVLKKMLAEWEAHIGSGAATVVLDIPLLFESGLQSWMDKVLVVYVDDDVQLRRLMARNGFTEEEALKRIRSQWPSAEKVKRADAVIDNNGNIEETRRQLLDILHQWDLLDKGGSGHHHHHH

SEQ ID NO: 4773 - DNA, 639 bp, synthetic construct
  misc_feature 1..639: note = Variant of 3'O-kinase
  source 1..639: mol_type = other DNA
atggcggttaccattggtttaacaggagggatcgcagcgggcaaatcgactgtgagtgccatgatgcgtgaactgggtctgccggtcatcgatgctgacgaggcagcacgcgccgttatgaagccaggcgaagaagcgtatcgcgacattgtagctgaattcgggccgggcatccttcgtgcggatggcgagatcgatcgccagaaactgggtgctatccgcttttcggacgaacaacaacgtaaggtgctgaattcgattgtaggtcctgcagtcctgaagaagatgctcgcggagtgggaagctcatatcgggtcaggcgccaagacggttgtgctggatatcccgctgctgttcgaatccggattgcaatcgtggatggacaaagttctcgtggtgtacgtcgatgatgatgttcagttacgccgccttatggcacgtaacgggtttactgaagaagaagctctgaagcgcattcgttcacagtggcccagtgcggagaaagttaaacaggcagacgctgtcatcgacaataatggcaatattgaagaaacccgccgccagctgctggacattttacaccagtgggatctgctggacaaaggtggctccggccaccatcatcaccatcactaatga

SEQ ID NO: 4774 - protein, 211 aa, synthetic construct
  REGION 1..211: note = Variant of 3'O-kinase
MAVTIGLTGGIAAGKSTVSAMMRELGLPVIDADEAARAVMKPGEEAYRDIVAEFGPGILRADGEIDRQKLGAIRFSDEQQRKVLNSIVGPAVLKKMLAEWEAHIGSGAKTVVLDIPLLFESGLQSWMDKVLVVYVDDDVQLRRLMARNGFTEEEALKRIRSQWPSAEKVKQADAVIDNNGNIEETRRQLLDILHQWDLLDKGGSGHHHHHH

SEQ ID NO: 4775 - DNA, 639 bp, synthetic construct
  misc_feature 1..639: note = Variant of 3'O-kinase
  source 1..639: mol_type = other DNA
atggcggttaccattggtttaacaggagggatcgcagcgggcaaatcgactgtgagtgccatgatgcgtgaactgggtctgccggtcatcgatgctgacgaggcagcacgcgccgttatgaagccaggcgaagaagcgtatcgcctgattgtagctgaattcgggccgggcatccttcgtgcggatggcgagatcgatcgccagaaactgggtgctatccgcttttcggacgaacaacaacgtaaggtgctgaattcgattgtaggtcctgcagtcctgaagaagatgctcgcggagtgggaagctcatatcgggtcaggcgccaagacggttgtgctggatatcccgctgctgttcgaatccggattgcaatcgtggatggacaaagttctcgtggtgtacgtcgatgatgatgttcagttacgccgccttatggcacgtaacgggtttactgaagaagaagctctgaagcgcattcgttcacagtggcccagtgcggagaaagttaaacgtgcagacgctgtcatcgacaataatggcaatattgaagaaacccgccgccagctgctggacattttacaccagtgggatctgctggacaaaggtggctccggccaccatcatcaccatcactaatga

SEQ ID NO: 4776 - protein, 211 aa, synthetic construct
  REGION 1..211: note = Variant of 3'O-kinase
MAVTIGLTGGIAAGKSTVSAMMRELGLPVIDADEAARAVMKPGEEAYRLIVAEFGPGILRADGEIDRQKLGAIRFSDEQQRKVLNSIVGPAVLKKMLAEWEAHIGSGAKTVVLDIPLLFESGLQSWMDKVLVVYVDDDVQLRRLMARNGFTEEEALKRIRSQWPSAEKVKRADAVIDNNGNIEETRRQLLDILHQWDLLDKGGSGHHHHHH

SEQ ID NO: 4777 - DNA, 639 bp, synthetic construct
  misc_feature 1..639: note = Variant of 3'O-kinase
  source 1..639: mol_type = other DNA
atggcggttaccattggtttaacaggagggatcgcagcgggcaaatcgactgtgagtgccatgatgcgtgaactgggtctgccggtcatcgatgctgacgaggcagcacgcgccgttatgaagccaggcgaagaagcgtatcgcgacattgtagctgaattcgggccgggcatccttcgtgcggatggcgagatcgatcgccagaaactgggtgctatccgcttttcggacgaacaacaacgtaaggtgctgaattcgattgtaggtcctgcagtcctgaagaagatgctcgcggagtgggaagctcatatcgggtcaggcgccaagacggttgtgctggatatcccgctgctgttcgaatccggattgcaatcgtggacggacaaagttctcgtggtgtacgtcgatgatgatgttcagttacgccgccttatggcacgtaacgggtttactgaagaagaagctctgaagcgcattcgttcacagtggcccagtgcggagaaagttaaacgtgcagacgctgtcatcgacaataatggcaatattgaagaaacccgccgccagctgctggacattttacaccagtgggatctgctggacaaaggtggctccggccaccatcatcaccatcactaatga

SEQ ID NO: 4778 - protein, 211 aa, synthetic construct
  REGION 1..211: note = Variant of 3'O-kinase
MAVTIGLTGGIAAGKSTVSAMMRELGLPVIDADEAARAVMKPGEEAYRDIVAEFGPGILRADGEIDRQKLGAIRFSDEQQRKVLNSIVGPAVLKKMLAEWEAHIGSGAKTVVLDIPLLFESGLQSWTDKVLVVYVDDDVQLRRLMARNGFTEEEALKRIRSQWPSAEKVKRADAVIDNNGNIEETRRQLLDILHQWDLLDKGGSGHHHHHH

SEQ ID NO: 4779 - DNA, 639 bp, synthetic construct
  misc_feature 1..639: note = Variant of 3'O-kinase
  source 1..639: mol_type = other DNA
atggcggttaccattggtttaacaggagggatcgcagcgggcaaatcgactgtgagtgccatgatgcgtgaactgggtctgccggtcatcgatgctgacgaggcagcacgcgccgttatgaagccaggcgaagaagcgtatcgcgacattgtagctgaattcgggccgggcatccttcgtgcggatggcgagatcgatcgccagaaactgggtgctatccgcttttcggacgaacaacaacgtaaggtgctgaattcgattgtaggtcctgcagtcctgaagaagatgctcgcggagtgggaagctcatatcgggtcaggcgccaagacggttgtgctggatatcccgctgctgttcgaatccggattgcaatcgtggatggacaaagttctcgtggtgtacgtcgatgatgatgttcagttacgccgccttatggcacgtaacgggtttactgaagaagaagctctgaagcgcattcgttcacagtggcccagtgcggagaaagttaaacgtgcagacgctgtcatcgacaataatggcaatattgaagaaacccgccgccagctgctggacattgttcaccagtgggatctgctggacaaaggtggctccggccaccatcatcaccatcactaatga

SEQ ID NO: 4780 - protein, 211 aa, synthetic construct
  REGION 1..211: note = Variant of 3'O-kinase
MAVTIGLTGGIAAGKSTVSAMMRELGLPVIDADEAARAVMKPGEEAYRDIVAEFGPGILRADGEIDRQKLGAIRFSDEQQRKVLNSIVGPAVLKKMLAEWEAHIGSGAKTVVLDIPLLFESGLQSWMDKVLVVYVDDDVQLRRLMARNGFTEEEALKRIRSQWPSAEKVKRADAVIDNNGNIEETRRQLLDIVHQWDLLDKGGSGHHHHHH

SEQ ID NO: 4781 - DNA, 639 bp, synthetic construct
  misc_feature 1..639: note = Variant of 3'O-kinase
  source 1..639: mol_type = other DNA
atggcggttaccattggtttaacaggagggatcgcagcgggcaaatcgactgtgagtgccatgatgcgtgaactgggtctgccggtcatcgatgctgacgaggcagcacgcgccgttatgaagccaggcgaagaagcgtatgctgacattgtagctgaattcgggccgggcatccttcgtgcggatggcgagatcgatcgccagaaactgggtgctatccgcttttcggacgaacaacaacgtaaggtgctgaattcgattgtaggtcctgcagtcctgaagaagatgctcgcggagtgggaagctcatatcgggtcaggcgccaagacggttgtgctggatatcccgctgctgttcgaatccggattgcaatcgtggatggacaaagttctcgtggtgtacgtcgatgatgatgttcagttacgccgccttatggcacgtaacgggtttactgaagaagaagctctgaagcgcattcgttcacagtggcccagtgcggagaaagttaaacgtgcagacgctgtcatcgacaataatggcaatattgaagaaacccgccgccagctgctggacattttacaccagtgggatctgctggacaaaggtggctccggccaccatcatcaccatcactaatga

SEQ ID NO: 4782 - protein, 211 aa, synthetic construct
  REGION 1..211: note = Variant of 3'O-kinase
MAVTIGLTGGIAAGKSTVSAMMRELGLPVIDADEAARAVMKPGEEAYADIVAEFGPGILRADGEIDRQKLGAIRFSDEQQRKVLNSIVGPAVLKKMLAEWEAHIGSGAKTVVLDIPLLFESGLQSWMDKVLVVYVDDDVQLRRLMARNGFTEEEALKRIRSQWPSAEKVKRADAVIDNNGNIEETRRQLLDILHQWDLLDKGGSGHHHHHH

SEQ ID NO: 4783 - DNA, 639 bp, synthetic construct
  misc_feature 1..639: note = Variant of 3'O-kinase
  source 1..639: mol_type = other DNA
atggcggttaccattggtttaacaggagggatcgcagcgggcaaatcgactgtgagtgccatgatgcgtgaactgggtctgccggtcatcgatgctgacgaggcagcacgcgccgttatgaagccaggcgaagaagcgtatcgcgacattgtagctgaattcgggccgggcatccttcgtgcggatggcgagatcgatcgccagaaactgggtgctatccgcttttcggacgaacaacaacgtaaggtgctgaattcgattgtaggtcctgcagtcctgcgtaagatgctcgcggagtgggaagctcatatcgggtcaggcgccaagacggttgtgctggatatcccgctgctgttcgaatccggattgcaatcgtggatggacaaagttctcgtggtgtacgtcgatgatgatgttcagttacgccgccttatggcacgtaacgggtttactgaagaagaagctctgaagcgcattcgttcacagtggcccagtgcggagaaagttaaacgtgcagacgctgtcatcgacaataatggcaatattgaagaaacccgccgccagctgctggacattttacaccagtgggatctgctggacaaaggtggctccggccaccatcatcaccatcactaatga

SEQ ID NO: 4784 - protein, 211 aa, synthetic construct
  REGION 1..211: note = Variant of 3'O-kinase
MAVTIGLTGGIAAGKSTVSAMMRELGLPVIDADEAARAVMKPGEEAYRDIVAEFGPGILRADGEIDRQKLGAIRFSDEQQRKVLNSIVGPAVLRKMLAEWEAHIGSGAKTVVLDIPLLFESGLQSWMDKVLVVYVDDDVQLRRLMARNGFTEEEALKRIRSQWPSAEKVKRADAVIDNNGNIEETRRQLLDILHQWDLLDKGGSGHHHHHH

SEQ ID NO: 4785 - DNA, 639 bp, synthetic construct
  misc_feature 1..639: note = Variant of 3'O-kinase
  source 1..639: mol_type = other DNA
atggcggttaccattggtttaacaggagggatcgcagcgggcaaatcgactgtgagtgccatgatgcgtgaactgggtctgccggtcatcgatgctgacgaggcagcacgcgccgttatgaagccaggcgaagaagcgtatcgcgacattgtagctgaattcgggccggctatccttcgtgcggatggcgagatcgatcgccagaaactgggtgctatccgcttttcggacgaacaacaacgtaaggtgctgaattcgattgtaggtcctgcagtcctgaagaagatgctcgcggagtgggaagctcatatcgggtcaggcgccaagacggttgtgctggatatcccgctgctgttcgaatccggattgcaatcgtggatggacaaagttctcgtggtgtacgtcgatgatgatgttcagttacgccgccttatggcacgtaacgggtttactgaagaagaagctctgaagcgcattcgttcacagtggcccagtgcggagaaagttaaacgtgcagacgctgtcatcgacaataatggcaatattgaagaaacccgccgccagctgctggacattttacaccagtgggatctgctggacaaaggtggctccggccaccatcatcaccatcactaatga

SEQ ID NO: 4786 - protein, 211 aa, synthetic construct
  REGION 1..211: note = Variant of 3'O-kinase
MAVTIGLTGGIAAGKSTVSAMMRELGLPVIDADEAARAVMKPGEEAYRDIVAEFGPAILRADGEIDRQKLGAIRFSDEQQRKVLNSIVGPAVLKKMLAEWEAHIGSGAKTVVLDIPLLFESGLQSWMDKVLVVYVDDDVQLRRLMARNGFTEEEALKRIRSQWPSAEKVKRADAVIDNNGNIEETRRQLLDILHQWDLLDKGGSGHHHHHH

SEQ ID NO: 4787 - DNA, 639 bp, synthetic construct
  misc_feature 1..639: note = Variant of 3'O-kinase
  source 1..639: mol_type = other DNA
atggcggttaccattggtttaacaggagggatcgcagcgggcaaatcgactgtgagtgccatgatgcgtgaactgggtctgccggtcatcgatgctgacgaggcagcacgcgccgttatgaagccaggcgaagaagcgtatcgcgacattgtagctgaattcgggccgggcatccttcgtgcggatggcgagatcgatcgccagaaactgggtgctatccgcttttcggacgaacaacaacgtaaggtgctgaattcgattgtaggtcctgcagtcctgaagaagatgctcgcggagtgggaagctcatatcgggtcaggcgccaagacggttgtgctggatatcccgctgctgttcgaatccggattgcaatcgtggatggacaaagttctcgtggtgtacgtcgatgatgatgttcagttacgccgccttatggcacgtaacgggtttactgaagaagaagctctgaagcgcattcgttcacagtggcccagtgcggagaaagttaaacgtgcagacgctgtcatcgacaataatggcaatattgaagaaacccgccgccagctgctggacattttacaccagtgggatagtctggacaaaggtggctccggccaccatcatcaccatcactaatga

SEQ ID NO: 4788 - protein, 211 aa, synthetic construct
  REGION 1..211: note = Variant of 3'O-kinase
MAVTIGLTGGIAAGKSTVSAMMRELGLPVIDADEAARAVMKPGEEAYRDIVAEFGPGILRADGEIDRQKLGAIRFSDEQQRKVLNSIVGPAVLKKMLAEWEAHIGSGAKTVVLDIPLLFESGLQSWMDKVLVVYVDDDVQLRRLMARNGFTEEEALKRIRSQWPSAEKVKRADAVIDNNGNIEETRRQLLDILHQWDSLDKGGSGHHHHHH

SEQ ID NO: 4789 - DNA, 639 bp, synthetic construct
  misc_feature 1..639: note = Variant of 3'O-kinase
  source 1..639: mol_type = other DNA
atggcggttaccattggtttaacaggagggatcgcagcgggcaaatcgactgtgagtgccatgatgcgtgaactgggtctgccggtcatcgatgctgacgaggcagcacgcgccgttatgaagccaggcgaagaagcgtatcgcgacattgtagctgaattcgggccgggcatccttcgtgcggatggcgagatcgatcgccagaaactgggtgctatccgcttttcggacgaacaacaacgtaaggtgctgaattcgattgtaggtcctgcagtcctgaagaagatgctcgcggagtgggaagctcatatcgggtcaggcgccaagacggttgtgctggatatcccgctgctgttcgaatccggattgcaatcgtggatggacaaagttctcgtggtgtacgtcgatgatgatgttcagttacgccgccttatggcacgtaacgggtttactgaagaagaagctctgaagcgcattcgttcacagtggcccagtgcggagaaagttaaactggcagacgctgtcatcgacaataatggcaatattgaagaaacccgccgccagctgctggacattttacaccagtgggatctgctggacaaaggtggctccggccaccatcatcaccatcactaatga

SEQ ID NO: 4790 - protein, 211 aa, synthetic construct
  REGION 1..211: note = Variant of 3'O-kinase
MAVTIGLTGGIAAGKSTVSAMMRELGLPVIDADEAARAVMKPGEEAYRDIVAEFGPGILRADGEIDRQKLGAIRFSDEQQRKVLNSIVGPAVLKKMLAEWEAHIGSGAKTVVLDIPLLFESGLQSWMDKVLVVYVDDDVQLRRLMARNGFTEEEALKRIRSQWPSAEKVKLADAVIDNNGNIEETRRQLLDILHQWDLLDKGGSGHHHHHH

SEQ ID NO: 4791 - DNA, 639 bp, synthetic construct
  misc_feature 1..639: note = Variant of 3'O-kinase
  source 1..639: mol_type = other DNA
atggcggttaccattggtttaacaggagggatcgcagcgggcaaatcgactgtgagtgccatgatgcgtgaactgggtctgccggtcatcgatgctgacgaggcagcacgcgccgttatgaagccaggcgaagaagcgtattgtgacattgtagctgaattcgggccgggcatccttcgtgcggatggcgagatcgatcgccagaaactgggtgctatccgcttttcggacgaacaacaacgtaaggtgctgaattcgattgtaggtcctgcagtcctgaagaagatgctcgcggagtgggaagctcatatcgggtcaggcgccaagacggttgtgctggatatcccgctgctgttcgaatccggattgcaatcgtggatggacaaagttctcgtggtgtacgtcgatgatgatgttcagttacgccgccttatggcacgtaacgggtttactgaagaagaagctctgaagcgcattcgttcacagtggcccagtgcggagaaagttaaacgtgcagacgctgtcatcgacaataatggcaatattgaagaaacccgccgccagctgctggacattttacaccagtgggatctgctggacaaaggtggctccggccaccatcatcaccatcactaatga

SEQ ID NO: 4792 - protein, 211 aa, synthetic construct
  REGION 1..211: note = Variant of 3'O-kinase
MAVTIGLTGGIAAGKSTVSAMMRELGLPVIDADEAARAVMKPGEEAYCDIVAEFGPGILRADGEIDRQKLGAIRFSDEQQRKVLNSIVGPAVLKKMLAEWEAHIGSGAKTVVLDIPLLFESGLQSWMDKVLVVYVDDDVQLRRLMARNGFTEEEALKRIRSQWPSAEKVKRADAVIDNNGNIEETRRQLLDILHQWDLLDKGGSGHHHHHH

SEQ ID NO: 4793 - DNA, 639 bp, synthetic construct
  misc_feature 1..639: note = Variant of 3'O-kinase
  source 1..639: mol_type = other DNA
atggcggttaccattggtttaacaggagggatcgcagcgggcaaatcgactgtgagtgccatgatgcgtgaactgggtctgccggtcatcgatgctgacgaggcagcacgcgccgttatgaagccaggcgaagaagcgtatacggacattgtagctgaattcgggccgggcatccttcgtgcggatggcgagatcgatcgccagaaactgggtgctatccgcttttcggacgaacaacaacgtaaggtgctgaattcgattgtaggtcctgcagtcctgaagaagatgctcgcggagtgggaagctcatatcgggtcaggcgccaagacggttgtgctggatatcccgctgctgttcgaatccggattgcaatcgtggatggacaaagttctcgtggtgtacgtcgatgatgatgttcagttacgccgccttatggcacgtaacgggtttactgaagaagaagctctgaagcgcattcgttcacagtggcccagtgcggagaaagttaaacgtgcagacgctgtcatcgacaataatggcaatattgaagaaacccgccgccagctgctggacattttacaccagtgggatctgctggacaaaggtggctccggccaccatcatcaccatcactaatga

SEQ ID NO: 4794 - protein, 211 aa, synthetic construct
  REGION 1..211: note = Variant of 3'O-kinase
MAVTIGLTGGIAAGKSTVSAMMRELGLPVIDADEAARAVMKPGEEAYTDIVAEFGPGILRADGEIDRQKLGAIRFSDEQQRKVLNSIVGPAVLKKMLAEWEAHIGSGAKTVVLDIPLLFESGLQSWMDKVLVVYVDDDVQLRRLMARNGFTEEEALKRIRSQWPSAEKVKRADAVIDNNGNIEETRRQLLDILHQWDLLDKGGSGHHHHHH

SEQ ID NO: 4795 - DNA, 639 bp, synthetic construct
  misc_feature 1..639: note = Variant of 3'O-kinase
  source 1..639: mol_type = other DNA
atggcggttaccattggtttaacaggagggatcgcagcgggcaaatcgactgtgagtgccatgatgcgtgaactgggtctgccggtcatcgatgctgacgaggcagcacgcgccgttatgaagccaggcgaagaagcgtatcgcgacattgtagctgaattcgggccgggcatccttcgtgcggatggcgagatcgatcgccagaaactgggtgctatccgcttttcggacgaacaacaacgtaaggtgctgaattcgattgtaggtcctgcagtcctgaagaagatgctcgcggagtgggaagctcatgttgggtcaggcgccaagacggttgtgctggatatcccgctgctgttcgaatccggattgcaatcgtggatggacaaagttctcgtggtgtacgtcgatgatgatgttcagttacgccgccttatggcacgtaacgggtttactgaagaagaagctctgaagcgcattcgttcacagtggcccagtgcggagaaagttaaacgtgcagacgctgtcatcgacaataatggcaatattgaagaaacccgccgccagctgctggacattttacaccagtgggatctgctggacaaaggtggctccggccaccatcatcaccatcactaatga

SEQ ID NO: 4796 - protein, 211 aa, synthetic construct
  REGION 1..211: note = Variant of 3'O-kinase
MAVTIGLTGGIAAGKSTVSAMMRELGLPVIDADEAARAVMKPGEEAYRDIVAEFGPGILRADGEIDRQKLGAIRFSDEQQRKVLNSIVGPAVLKKMLAEWEAHVGSGAKTVVLDIPLLFESGLQSWMDKVLVVYVDDDVQLRRLMARNGFTEEEALKRIRSQWPSAEKVKRADAVIDNNGNIEETRRQLLDILHQWDLLDKGGSGHHHHHH

SEQ ID NO: 4797 - DNA, 639 bp, synthetic construct
  misc_feature 1..639: note = Variant of 3'O-kinase
  source 1..639: mol_type = other DNA
atggcggttaccattggtttaacaggagggatcgcagcgggcaaatcgactgtgagtgccatgatgcgtgaactgggtctgccggtcatcgatgctgacgaggcagcacgcgccgttatgaagccaggcgaagaagcgtatcgcgacattgtagctgaattcgggccgggcatccttcgtgcggatggcgagatcgatcgccagaaactgggtgctatccgcttttcggacgaacaacaacgtaaggtgctgaattcgattgtaggtcctgcagtcctgaagaagatgctcgcggagtgggaagctcatatcgggtcaggcgccatgacggttgtgctggatatcccgctgctgttcgaatccggattgcaatcgtggatggacaaagttctcgtggtgtacgtcgatgatgatgttcagttacgccgccttatggcacgtaacgggtttactgaagaagaagctctgaagcgcattcgttcacagtggcccagtgcggagaaagttaaacgtgcagacgctgtcatcgacaataatggcaatattgaagaaacccgccgccagctgctggacattttacaccagtgggatctgctggacaaaggtggctccggccaccatcatcaccatcactaatga

SEQ ID NO: 4798 - protein, 211 aa, synthetic construct
  REGION 1..211: note = Variant of 3'O-kinase
MAVTIGLTGGIAAGKSTVSAMMRELGLPVIDADEAARAVMKPGEEAYRDIVAEFGPGILRADGEIDRQKLGAIRFSDEQQRKVLNSIVGPAVLKKMLAEWEAHIGSGAMTVVLDIPLLFESGLQSWMDKVLVVYVDDDVQLRRLMARNGFTEEEALKRIRSQWPSAEKVKRADAVIDNNGNIEETRRQLLDILHQWDLLDKGGSGHHHHHH

SEQ ID NO: 4799 - DNA, 639 bp, synthetic construct
  misc_feature 1..639: note = Variant of 3'O-kinase
  source 1..639: mol_type = other DNA
atggcggttaccattggtttaacaggagggatcgcagcgggcaaatcgactgtgagtgccatgatgcgtgaactgggtctgccggtcatcgatgctgacgaggcagcacgcgccgttatgaagccaggcgaagaagcgtatcgcgacattgtagctgaattcgggccgggcatccttcgtgcggatggcgagatcgatcgccagaaactgggtgctatccgcttttcggacgaacaacaacgtaaggtgctgaattcgattgtaggtcctgcagtcctgaagaagatgctcgcggagtgggaagctcatatcgggtcaggcgccaagacggttgtgctggatatcccgctgctgttcgaatccggattgcaatcgtggatggacaaagttctcgtggtgtacgtcgatgatgatgttcagttacgccgccttatggcacgtaacgggtttactgaagaagaagctctgaagcgcattcgttcacagtggcccagtgcggagaaagttaaacgtgcagacgctgtcatcgacaataatggcaatattgaagaaaccagtcgccagctgctggacattttacaccagtgggatctgctggacaaaggtggctccggccaccatcatcaccatcactaatga

SEQ ID NO: 4800 - protein, 211 aa, synthetic construct
  REGION 1..211: note = Variant of 3'O-kinase
MAVTIGLTGGIAAGKSTVSAMMRELGLPVIDADEAARAVMKPGEEAYRDIVAEFGPGILRADGEIDRQKLGAIRFSDEQQRKVLNSIVGPAVLKKMLAEWEAHIGSGAKTVVLDIPLLFESGLQSWMDKVLVVYVDDDVQLRRLMARNGFTEEEALKRIRSQWPSAEKVKRADAVIDNNGNIEETSRQLLDILHQWDLLDKGGSGHHHHHH

SEQ ID NO: 4801 - DNA, 639 bp, synthetic construct
  misc_feature 1..639: note = Variant of 3'O-kinase
  source 1..639: mol_type = other DNA
atggcggttaccattggtttaacaggagggatcgcagcgggcaaatcgactgtgagtgccatgatgcgtgaactgggtctgccggtcatcgatgctgacgaggcagcacgcgccgttatgaagccaggcgaagaagcgtatcgcgacattattgctgaattcgggccgggcatccttcgtgcggatggcgagatcgatcgccagaaactgggtgctatccgcttttcggacgaacaacaacgtaaggtgctgaattcgattgtaggtcctgcagtcctgaagaagatgctcgcggagtgggaagctcatatcgggtcaggcgccaagacggttgtgctggatatcccgctgctgttcgaatccggattgcaatcgtggatggacaaagttctcgtggtgtacgtcgatgatgatgttcagttacgccgccttatggcacgtaacgggtttactgaagaagaagctctgaagcgcattcgttcacagtggcccagtgcggagaaagttaaacgtgcagacgctgtcatcgacaataatggcaatattgaagaaacccgccgccagctgctggacattttacaccagtgggatctgctggacaaaggtggctccggccaccatcatcaccatcactaatga

SEQ ID NO: 4802 - protein, 211 aa, synthetic construct
  REGION 1..211: note = Variant of 3'O-kinase
MAVTIGLTGGIAAGKSTVSAMMRELGLPVIDADEAARAVMKPGEEAYRDIIAEFGPGILRADGEIDRQKLGAIRFSDEQQRKVLNSIVGPAVLKKMLAEWEAHIGSGAKTVVLDIPLLFESGLQSWMDKVLVVYVDDDVQLRRLMARNGFTEEEALKRIRSQWPSAEKVKRADAVIDNNGNIEETRRQLLDILHQWDLLDKGGSGHHHHHH

SEQ ID NO: 4803 - DNA, 639 bp, synthetic construct
  misc_feature 1..639: note = Variant of 3'O-kinase
  source 1..639: mol_type = other DNA
atggcggttaccattggtttaacaggagggatcgcagcgggcaaatcgactgtgagtgccatgatgcgtgaactgggtctgccggtcatcgatgctgacgaggcagcacgcgccgttatgaaaccaggcgaagaagcgtatcgcgacattgtagctgaattcgggccgggcatccttcgtgcggatggccgtatcgatcgcgggaaactgcgtgccatccgcttttcggacgaacaacaacgtaaggtgctgaattcgattgtaggtcctgcagtcctgaagaagatgctcgcggagtgggaagctcatatcgggtcaggcgccaagacggttgtgctggatatcccgctgctgttcgaatccggattgcaatcgtggatggacaaagttctcgtggtgtacgttgatgatgatgttcagttacgccgccttatggcacgtaacgggctgactgaagaagaagctctgatgcgcattcgctcgcagtggcccagtgcggagaaagttaaacgtgcagacgctgtcatcgacaataatggcaccattgaagatacccgccgccagctgctggacattttacaccagtgggatctgctggacaaaggtggctccggccaccatcatcaccatcactaatga

SEQ ID NO: 4804 - protein, 211 aa, synthetic construct
  REGION 1..211: note = Variant of 3'O-kinase
MAVTIGLTGGIAAGKSTVSAMMRELGLPVIDADEAARAVMKPGEEAYRDIVAEFGPGILRADGRIDRGKLRAIRFSDEQQRKVLNSIVGPAVLKKMLAEWEAHIGSGAKTVVLDIPLLFESGLQSWMDKVLVVYVDDDVQLRRLMARNGLTEEEALMRIRSQWPSAEKVKRADAVIDNNGTIEDTRRQLLDILHQWDLLDKGGSGHHHHHH

SEQ ID NO: 4805 - DNA, 639 bp, synthetic construct
  misc_feature 1..639: note = Variant of 3'O-kinase
  source 1..639: mol_type = other DNA
atggcggttaccattggtttaacaggagggatcgcagcgggcaaatcgactgtgagtgccatgatgcgtgaactgggtctgccggtcatcgatgctgacgaggcagcacgcgccgttatgaaaccaggcgaagaagcgtatcgcgacattgtagctgaattcgggccgggcatccttcgtgcggatggccgtatcgatcgcgggaaactgcgtgacatccgcttttcggacgaacaacaacgtaaggtgctgaattcgattgtaggtcctgcagtcctgaagaagatgctcgcggagtgggaagctcatatcgggtcaggcgccaagacggttgtgctggatgttccgctgctgttcgaatccggattgcaatcgtggatggacaaagttctcgtggtgtacgttgatgatgatgttcagttacgccgccttatggcacgtaacgggctgactgaagaagaagctctgatgcgcattcgttcacagtggcccagtgcggagaaagttaaacgtgcagacgctgtcatcgacaataatggcaatattgaagatacccgccgccagctgctggacattttacaccagtgggatctgctggacaaaggtggctccggccaccatcatcaccatcactaatga

SEQ ID NO: 4806 - protein, 211 aa, synthetic construct
  REGION 1..211: note = Variant of 3'O-kinase
MAVTIGLTGGIAAGKSTVSAMMRELGLPVIDADEAARAVMKPGEEAYRDIVAEFGPGILRADGRIDRGKLRDIRFSDEQQRKVLNSIVGPAVLKKMLAEWEAHIGSGAKTVVLDVPLLFESGLQSWMDKVLVVYVDDDVQLRRLMARNGLTEEEALMRIRSQWPSAEKVKRADAVIDNNGNIEDTRRQLLDILHQWDLLDKGGSGHHHHHH

SEQ ID NO: 4807 - DNA, 639 bp, synthetic construct
  misc_feature 1..639: note = Variant of 3'O-kinase
  source 1..639: mol_type = other DNA
atggcggttaccattggtttaacaggaagtatcgcagcgggcaaatcgactgtgagtgccatgatgcgtgaactgggttttccggtcatcgatgctgacgaggcagcacgctcggttatgaagccaggcgaagaagcgtatcgcatgattgtagctgaattcgggccgggcatccttcgtgcggatggcgagatcgatcgcgggaaactgcgtgctatccgcttttcggacgaacaacaacgtaaggtgctgaattcgattgtaggtcctgcagtcctgaagaagatgctcgcggagtgggaagctcatatcgggtcaggcgccaagacggttgtgctggatatcccgctgctgttcgaatccggattgcaaagttggatggacaaagttctcgtggtgtacgttgatgatgatgttcagttacgccgccttatggcacgtaacgggtttactgaagaagaagctctgatgcgcattcgttcacagtggcccagtgcggagaaagttaaacgtgcagacgctgtcatcgacaataatggcaatattgaagatacccgccgccagctgctggacattttacaccagtgggatctgctggacaaaggtggctccggccaccatcatcaccatcactaatga

SEQ ID NO: 4808 - protein, 211 aa, synthetic construct
  REGION 1..211: note = Variant of 3'O-kinase
MAVTIGLTGSIAAGKSTVSAMMRELGFPVIDADEAARSVMKPGEEAYRMIVAEFGPGILRADGEIDRGKLRAIRFSDEQQRKVLNSIVGPAVLKKMLAEWEAHIGSGAKTVVLDIPLLFESGLQSWMDKVLVVYVDDDVQLRRLMARNGFTEEEALMRIRSQWPSAEKVKRADAVIDNNGNIEDTRRQLLDILHQWDLLDKGGSGHHHHHH

SEQ ID NO: 4809 - DNA, 639 bp, synthetic construct
  misc_feature 1..639: note = Variant of 3'O-kinase
  source 1..639: mol_type = other DNA
atggcggttaccattggtttaacaggagggatcgcagcgggcaaatcgactgtgagtgccatgatgcgtgaactgggtctgccggtcatcgatgctgacgaggcagcacgcgccgttatgaaaccaggcgaagaagcgtatcgcgacattgtagctgaattcgggccgggcatccttcgtgcggatggcgagatcgatcgcgggaaactgcgtgctatccgcttttcggacgaacaacaacgtaaggtgctgaattcgattgtaggtcctgcagtcctgaagaagatgctcgcggagtgggaagctcatatcgggtcaggcgccaagacggttgtgctggatattccgggcctgttcgaatccggattgcagtcgtggatggacaaagttctcgtggtgtacgttgatgatgatgttcagttacgccgccttatggcacgtaacgggctgactgaagaagaagctctgatgcgcattcgttcacagtggcccagtgcggagaaagttaaacgtgcagacgctgtcatcgacaataatggcaatattgaagatacccgccgccagctgctggacattttacaccagtgggatctgctggacaaaggtggctccggccaccatcatcaccatcactaatga

SEQ ID NO: 4810 - protein, 211 aa, synthetic construct
  REGION 1..211: note = Variant of 3'O-kinase
MAVTIGLTGGIAAGKSTVSAMMRELGLPVIDADEAARAVMKPGEEAYRDIVAEFGPGILRADGEIDRGKLRAIRFSDEQQRKVLNSIVGPAVLKKMLAEWEAHIGSGAKTVVLDIPGLFESGLQSWMDKVLVVYVDDDVQLRRLMARNGLTEEEALMRIRSQWPSAEKVKRADAVIDNNGNIEDTRRQLLDILHQWDLLDKGGSGHHHHHH

SEQ ID NO: 4811 - DNA, 639 bp, synthetic construct
  misc_feature 1..639: note = Variant of 3'O-kinase
  source 1..639: mol_type = other DNA
atggcggttaccattggtttaacaggaggtatcgcagcgggcaaatcgactgtgagtgccatgatgcgtgaactgggttttccggtcatcgatgctgacgaggcagcacgcgccgttatgaagccaggcgaagaagcgtatcgcgacattgtagctgaattcgggccgggcatccttgctgcggatggcgagatcgatcgcgggaaactgcgtgctatccgcttttcggacgaacaacaacgtaagcgcctgaattcgattgtaggtcctgcagtcctgaagaagatgctcgcggagtgggaagctcatatcgggtcaggcgccaagacggttgtgctggatatcccgctgctgttcgaatccggattgcaagagtggatggacaaagttctcgtggtgtacgttgatgatgatgttcagttacgccgccttatggcacgtaacgggtttactgaagaagaagctctgatgcgcattcgttcacagtggcccagtgcggagaaagttaaacgtgcagacgctgtcatcgacaataatggcaatattgaagatacccgccgccagctgctggacattttacaccagtgggatctgctggacaaaggtggctccggccaccatcatcaccatcactaatga

SEQ ID NO: 4812 - protein, 211 aa, synthetic construct
  REGION 1..211: note = Variant of 3'O-kinase
MAVTIGLTGGIAAGKSTVSAMMRELGFPVIDADEAARAVMKPGEEAYRDIVAEFGPGILAADGEIDRGKLRAIRFSDEQQRKRLNSIVGPAVLKKMLAEWEAHIGSGAKTVVLDIPLLFESGLQEWMDKVLVVYVDDDVQLRRLMARNGFTEEEALMRIRSQWPSAEKVKRADAVIDNNGNIEDTRRQLLDILHQWDLLDKGGSGHHHHHH

SEQ ID NO: 4813 - DNA, 639 bp, synthetic construct
  misc_feature 1..639: note = Variant of 3'O-kinase
  source 1..639: mol_type = other DNA
atggcggttaccattggtttaacaggagggatcgcagcgggcaaatcgactgtgagtgccatgatgcgtgaactgggtctgccggtcatcgatgctgacgaggcagcacgcgccgttatgaaaccaggcgaagaagcgtatcgcgacattgtagctgaattcgggccgggcatccttcgtgcggatggccgtatcgatcgcgggaaactgcgtgccatccgcttttcggacgaacaacaacgtaaggtgctgaattcgattgtaggtcctgcagtcctgaagaagatgctcgcggagtgggaagctatgatcgggtcaggcgccaagacggttgtgctggatatcccgctgctgttcgaatccggattgcaatcgtggatggacaaagttctcgtggtgtacgttgatgatgatgttcagttacgccgccttatggcacgtaacgggctgactgaagaagaagctctgatgcgcattcgttcacagtggcccagtgcggagaaagttaaacgtgcagacgctgtcatcgacaataatggcaccattgaagatacccgccgccagctgctggacattttacaccagtgggatctgctggacaaaggtggctccggccaccatcatcaccatcactaatga

SEQ ID NO: 4814 - protein, 211 aa, synthetic construct
  REGION 1..211: note = Variant of 3'O-kinase
MAVTIGLTGGIAAGKSTVSAMMRELGLPVIDADEAARAVMKPGEEAYRDIVAEFGPGILRADGRIDRGKLRAIRFSDEQQRKVLNSIVGPAVLKKMLAEWEAMIGSGAKTVVLDIPLLFESGLQSWMDKVLVVYVDDDVQLRRLMARNGLTEEEALMRIRSQWPSAEKVKRADAVIDNNGTIEDTRRQLLDILHQWDLLDKGGSGHHHHHH

SEQ ID NO: 4815 - DNA, 639 bp, synthetic construct
  misc_feature 1..639: note = Variant of 3'O-kinase
  source 1..639: mol_type = other DNA
atggcggttaccattggtttaacaggagggatcgcagcgggcaaatcgactgtgagtgccatgatgcgtgaactgggtctgccggtcatcgatgctgacgaggcagcacgcgccgttatgaagccaggcgaagaagcgtatcgcgacattgtagctgaattcgggccgggcatccttcgtgcggatggcgagatcgatcgcgggaaactgcgtgctatccgcttttcggacgaacaacaacgtaaggtgctgaattcgattgtaggtcctgcagtcctgaagaagatgctcgcggagtgggaagcttttatcgggtcaggcgccaagacggttgtgctggatatcccgctgctgttcgaatccggattgcaatcgtggatggacaaagttctcgtggtgtacgttgatgatgatgttcagttacgccgccttatggcacgtaacgggtttactgaagaagaagctctgatgcgcattcgttcacagtggcccagtgcggagaaagttaaacgtgcagacgctgtcatcgacaataatggcaatgaggaagatacccgccgccagctgctggacattttacaccagtgggatctgctggacaaaggtggctccggccaccatcatcaccatcactaatga

SEQ ID NO: 4816 - protein, 211 aa, synthetic construct
  REGION 1..211: note = Variant of 3'O-kinase
MAVTIGLTGGIAAGKSTVSAMMRELGLPVIDADEAARAVMKPGEEAYRDIVAEFGPGILRADGEIDRGKLRAIRFSDEQQRKVLNSIVGPAVLKKMLAEWEAFIGSGAKTVVLDIPLLFESGLQSWMDKVLVVYVDDDVQLRRLMARNGFTEEEALMRIRSQWPSAEKVKRADAVIDNNGNEEDTRRQLLDILHQWDLLDKGGSGHHHHHH

SEQ ID NO: 4817 - DNA, 639 bp, synthetic construct
  misc_feature 1..639: note = Variant of 3'O-kinase
  source 1..639: mol_type = other DNA
atggcggttaccattggtttaacaggagggatcgcagcgggcaaatcgactgtgagtgccatgatgcgtgaactgggtctgccggtcatcgatgctgacgaggcagcacgcgccgttatgaaaccaggcgaagaagcgtatcgcgacattgtagctgaattcgggccgggcatccttcgtgcggatggcgaaatcgatcgcgggaaactgcgtgacatccgcttttcggacgaacaacaacgtaaggtgctgaattcgattgtaggtcctgcagtcctgaagaagatgctcgcggagtgggaagctatgatcgggtcaggcgccaagacggttgtgctggatattccgctgctgttcgaatccggattgcaggcgtggatggacaaagttctcgtggtgtacgttgatgatgatgttcagttacgccgccttatggcacgtaacgggctgactgaagaagaagctctgatgcgcattgaatcgcagtggcccagtgcggagaaagttaaacgtgcagacgctgtcatcgacaataatggcagcattgaagatacccgccgccagctgctggacattttacaccagtgggatctgctggacaaaggtggctccggccaccatcatcaccatcactaatga

SEQ ID NO: 4818 - protein, 211 aa, synthetic construct
  REGION 1..211: note = Variant of 3'O-kinase
MAVTIGLTGGIAAGKSTVSAMMRELGLPVIDADEAARAVMKPGEEAYRDIVAEFGPGILRADGEIDRGKLRDIRFSDEQQRKVLNSIVGPAVLKKMLAEWEAMIGSGAKTVVLDIPLLFESGLQAWMDKVLVVYVDDDVQLRRLMARNGLTEEEALMRIESQWPSAEKVKRADAVIDNNGSIEDTRRQLLDILHQWDLLDKGGSGHHHHHH

SEQ ID NO: 4819 - DNA, 639 bp, synthetic construct
  misc_feature 1..639: note = Variant of 3'O-kinase
  source 1..639: mol_type = other DNA
atggcggttaccattggtttaacaggagggatcgcagcgggcaaatcgactgtgagtgccatgatgcgtgaactgggtctgccggtcatcgatgctgacgaggcagcacgcgccgttatgaagccaggcgaagaagcgtatcgcgacattgtagctgaattcgggccgggcatccttcgcgcggatggcgagatcgatcgcagcaaactgcgtctgatccgcttttcggacgaacaacaacgtaagcgcctgaattcgattgtaggtcctgcagtcctgaagaagatgctcgcggagtgggaagctcatatcgggtcaggcgccaagacggttgtgctggatatcccgctgctgttcgaatccggattgcaatcgtggatggacaaagttctcgtggtgtacgttgatgatgatgttcagttacgccgccttatggcacgtaacgggtttactgaagaagaagctctgatgcgcattcgttcacagtggcccagtgcggagaaagttaaacgtgcagacgctgaaatcgacaataatggcaatattgaagatacccgccgccagctgctggacattttacaccagtgggatctgctggacaaaggtggctccggccaccatcatcaccatcactaatga

SEQ ID NO: 4820 - protein, 211 aa, synthetic construct
  REGION 1..211: note = Variant of 3'O-kinase
MAVTIGLTGGIAAGKSTVSAMMRELGLPVIDADEAARAVMKPGEEAYRDIVAEFGPGILRADGEIDRSKLRLIRFSDEQQRKRLNSIVGPAVLKKMLAEWEAHIGSGAKTVVLDIPLLFESGLQSWMDKVLVVYVDDDVQLRRLMARNGFTEEEALMRIRSQWPSAEKVKRADAEIDNNGNIEDTRRQLLDILHQWDLLDKGGSGHHHHHH

SEQ ID NO: 4821 - DNA, 639 bp, synthetic construct
  misc_feature 1..639: note = Variant of 3'O-kinase
  source 1..639: mol_type = other DNA
atggcggttaccattggtttaacaggagggatcgcagcgggcaaatcgactgtgagtgccatgatgcgtgaactgggtctgccggtcatcgatgctgacgaggcagcacgcgccgttatggcgccaggcgaagaagcgtatcgcgacattgtagctgaattcgggccgggcatccttcgtgcggatggccgtatcgatcgcgggaaactgcgtgacatccgcttttcggacgaacaacaacgtaaggtgctgaattcgattgtaggtcctgcagtcctgaagaagatgctcgcggagtgggaagctatgatcgggtcaggcgccaagacggttgtgctggatatcccgctgctgttcgaatccggattgcaatcgtggatggacaaagttctcgtggtgtacgttgatgatgatgttcagttacgccgccttatggcacgtaacgggtttactgaagaagaagctctgatgcgcattaaatcgcagtggcccagtgcggagaaagttaaacgtgcagacgctgtcatcgacaataatggcaacattgaagatacccgccgccagctgctggacattttacaccagtgggatctgctggacaaaggtggctccggccaccatcatcaccatcactaatga

SEQ ID NO: 4822 - protein, 211 aa, synthetic construct
  REGION 1..211: note = Variant of 3'O-kinase
MAVTIGLTGGIAAGKSTVSAMMRELGLPVIDADEAARAVMAPGEEAYRDIVAEFGPGILRADGRIDRGKLRDIRFSDEQQRKVLNSIVGPAVLKKMLAEWEAMIGSGAKTVVLDIPLLFESGLQSWMDKVLVVYVDDDVQLRRLMARNGFTEEEALMRIKSQWPSAEKVKRADAVIDNNGNIEDTRRQLLDILHQWDLLDKGGSGHHHHHH

SEQ ID NO: 4823 - DNA, 639 bp, synthetic construct
  misc_feature 1..639: note = Variant of 3'O-kinase
  source 1..639: mol_type = other DNA
atggcggttaccattggtttaacaggagggatcgcagcgggcaaatcgactgtgagtgccatgatgcgtgaactgggtctgccggtcatcgatgctgacgaggcagcacgcgccgttatgaagccaggcgaagaagcgtatcgcgacattgtagctgaattcgggccgggcatccttcgtgcggatggcgagatcgatcgcgggaaactgcgtgctatccgcttttcggacgaacaacaacgtaaggtgctgaattcgattgtaggtcctgcagtcctgaagaagatgctcgcggagtgggaagctcatatcgggtcaggcgccaagacggttgtgctggatatcccgctgctgttcgaatccggattgcaatcgtggatggacaaagttctcgtggtgtacgttgatgatgatgttcagttacgccgccttatggcacgtaacgggctgactgaagaagaagctctgatgcgcattgaatcgcagtggcccagtgcggagaaagttaaacgtgcagacgctgtcatcgacaataatggcgtgattgaagatacccgccgccagctgctggacattttacaccagtgggatctgctggacaaaggtggctccggccaccatcatcaccatcactaatga

SEQ ID NO: 4824 - protein, 211 aa, synthetic construct
  REGION 1..211: note = Variant of 3'O-kinase
MAVTIGLTGGIAAGKSTVSAMMRELGLPVIDADEAARAVMKPGEEAYRDIVAEFGPGILRADGEIDRGKLRAIRFSDEQQRKVLNSIVGPAVLKKMLAEWEAHIGSGAKTVVLDIPLLFESGLQSWMDKVLVVYVDDDVQLRRLMARNGLTEEEALMRIESQWPSAEKVKRADAVIDNNGVIEDTRRQLLDILHQWDLLDKGGSGHHHHHH

SEQ ID NO: 4825 - DNA, 639 bp, synthetic construct
  misc_feature 1..639: note = Variant of 3'O-kinase
  source 1..639: mol_type = other DNA
atggcgactaccattggtttaacaggagggatcgcagcgggcaaatcgactgtgagttgcatgatgcgtgaactgggtctgccggtcatcgatgctgacgaggcagcacgcgccgttatgaagccaggcgaagaagcgtatcgcgacattgtagctgaattcgggccgggcatccttcgtgcggatggcgagatcgatcgcgggaaactgcgtgctatctttttttcggacgaacaacaacgtaaggtgctgaattcgattgtaggtcctgcagtcctgaagaagatgctcgcggagtgggaagcttttatcgggtcaggcgccaagacggttgtgctggatatcccgctgctgttcgaatccggattgcaatcgtggatggacaaagttctcgtggtgtacgttgatgatgatgttcagttacgccgccttatggcacgtaacgggtttactgaagaagaagctctgatgcgcattcgttcacagtggcccagtgcggagaaagttaaacgtgcagacgctgtcatcgacaataatggcaatattgaagatacccgccgccagctgctggacattttacaccagtgggatctgctggacaaaggtggctccggccaccatcatcaccatcactaatga

SEQ ID NO: 4826 - protein, 211 aa, synthetic construct
  REGION 1..211: note = Variant of 3'O-kinase
MATTIGLTGGIAAGKSTVSCMMRELGLPVIDADEAARAVMKPGEEAYRDIVAEFGPGILRADGEIDRGKLRAIFFSDEQQRKVLNSIVGPAVLKKMLAEWEAFIGSGAKTVVLDIPLLFESGLQSWMDKVLVVYVDDDVQLRRLMARNGFTEEEALMRIRSQWPSAEKVKRADAVIDNNGNIEDTRRQLLDILHQWDLLDKGGSGHHHHHH

SEQ ID NO: 4827 - DNA, 639 bp, synthetic construct
  misc_feature 1..639: note = Variant of 3'O-kinase
  source 1..639: mol_type = other DNA
atggcggttaccattggtttaacaggaggtatcgcagcgggcaaatcgactgtgagtgccatgatgcgtgaactgggttttccggtcatcgatgctgacgaggcagcacgcgccgttatgaagccaggcgaagaagcgtatcgcgacattgtagctgaattcgggccgggcatccttcgcgcggatggcgagatcgatcgcgggaaactgcgtgctatccgcttttcggacgaacaacaacgtaagcgcctgaattcgattgtaggtcctgcagtcctgaagaagatgctcgcggagtgggaagctcatatcgggtcaggcgccaagacggttgtggccgatatcccgctgctgttcgaatccggattgcaaagttggatggacaaagttctcgtggtgtacgttgatgatgatgttcagttacgccgccttatggcacgtaacgggtttactgaagaagaagctctgatgcgcattcgttcacagtggcccagtgcggagaaagttaaacgtgcagacgctgtcatcgacaataatggcaatattgaagatacccgccgccagctgctggacattttacaccagtgggatctgctggacaaaggtggctccggccaccatcatcaccatcactaatga

SEQ ID NO: 4828 - protein, 211 aa, synthetic construct
  REGION 1..211: note = Variant of 3'O-kinase
MAVTIGLTGGIAAGKSTVSAMMRELGFPVIDADEAARAVMKPGEEAYRDIVAEFGPGILRADGEIDRGKLRAIRFSDEQQRKRLNSIVGPAVLKKMLAEWEAHIGSGAKTVVADIPLLFESGLQSWMDKVLVVYVDDDVQLRRLMARNGFTEEEALMRIRSQWPSAEKVKRADAVIDNNGNIEDTRRQLLDILHQWDLLDKGGSGHHHHHH

SEQ ID NO: 4829 - DNA, 639 bp, synthetic construct
  misc_feature 1..639: note = Variant of 3'O-kinase
  source 1..639: mol_type = other DNA
atggcggttaccattggtttaacaggagggatcgcagcgggcaaatcgactgtgagtgccatgatgcgtgaactgggtctgccggtcatcgatgctgacgaggcagcacgcgccgttatgaagccaggcgaagaagcgtatcgcgacattgtagctgaattcgggccgggcatccttcgtgcggatggcgagatcgatcgcgggaaactgcgtgctatccgcttttcggacgaacaacaacgtaaggtgctgaattcgattgtaggtcctgcagtcctgaagaagatgctcgcggagtgggaagctcatatcgggtcaggcgccaagacggttgtgctggatatcccgctgctgttcgaatccggattgcaatcgtggatggacaaagttctcgtggtgtacgttgatgatgatgttcagttacgccgccttatggcacgtaacgggtttactgaagaagaagctctgatgcgcattcgttcacagtggcccagtgcggagaaagttaaacgtgcagacgctgtcatcgacaataatggcaatattgaagatacccgccgccagctgctggacctgttacaccagtgggatctgctggacaaaggtggctccggccaccatcatcaccatcactaatga

SEQ ID NO: 4830 - protein, 211 aa, synthetic construct
  REGION 1..211: note = Variant of 3'O-kinase
MAVTIGLTGGIAAGKSTVSAMMRELGLPVIDADEAARAVMKPGEEAYRDIVAEFGPGILRADGEIDRGKLRAIRFSDEQQRKVLNSIVGPAVLKKMLAEWEAHIGSGAKTVVLDIPLLFESGLQSWMDKVLVVYVDDDVQLRRLMARNGFTEEEALMRIRSQWPSAEKVKRADAVIDNNGNIEDTRRQLLDLLHQWDLLDKGGSGHHHHHH

SEQ ID NO: 4831 - DNA, 639 bp, synthetic construct
  misc_feature 1..639: note = Variant of 3'O-kinase
  source 1..639: mol_type = other DNA
atggcggttaccattggtttaacaggagggatcgcagcgggcaaatcgactgtgagtgccatgatgcgtgaactgggtctgccggtcatcgatgctgacgaggcagcacgcgccgttatgaagccaggcgaagaagcgtatcgcgacattgtagctgaattcgggccgggcatccttcgtgcggatggcgagatcgatcgcgggaaactgcgtgctatccgcttttcggacgaacaacaacgtaaggtgctgaattcgattgtaggtcctgcagtcctgaagaagatgctcgcggagtgggaagctctgatcgggtcaggcgccaagacggttgtgctggatatcccgctgctgttcgaatccggattgcaatcgtggatggacaaagttctcgtggtgtacgttgatgatgatgttcagttacgccgccttatggcacgtaacgggtttactgaagaagaagctctgatgcgcattcgttcacagtggcccagtgcggagaaagttaaacgtgcagacgctgtcatcgacaataatggcaatccagaagatacccgccgccagctgctggacattttacaccagtgggatctgctggacaaaggtggctccggccaccatcatcaccatcactaatga

SEQ ID NO: 4832 - protein, 211 aa, synthetic construct
  REGION 1..211: note = Variant of 3'O-kinase
MAVTIGLTGGIAAGKSTVSAMMRELGLPVIDADEAARAVMKPGEEAYRDIVAEFGPGILRADGEIDRGKLRAIRFSDEQQRKVLNSIVGPAVLKKMLAEWEALIGSGAKTVVLDIPLLFESGLQSWMDKVLVVYVDDDVQLRRLMARNGFTEEEALMRIRSQWPSAEKVKRADAVIDNNGNPEDTRRQLLDILHQWDLLDKGGSGHHHHHH

SEQ ID NO: 4833 - DNA, 639 bp, synthetic construct
  misc_feature 1..639: note = Variant of 3'O-kinase
  source 1..639: mol_type = other DNA
atggcggttaccattggtttaacaggagggatcgcagcgggcaaatcgactgtgagtgccatgatgcgtgaactgggtctgccggtcatcgatgctgacgaggcagcacgcgccgttatgaaaccaggcgaagaagcgtatcgcgacattgtagctgaattcgggccgggcatccttcgtgcggatggcgagatcgatcgcgggaaactgcgtgccatccgcttttcggacgaacaacaacgtaaggtgctgaattcgattgtaggtcctgcagtcctgaagaagatgctcgcggagtgggaagctcatatcgggtcaggcgccaagacggttgtgctggatatcccgctgctgttcgaatccggattgcagtcgtggatggacaaagttctcgtggtgtacgttgatgatgatgttcagttacgccgccttatggcacgtaacgggctgactgaagaagaagctctgatgcgcattcgctcgcagtggcccagtgcggagaaagttaaacgtgcagacgctgtcatcgacaataatggcagcattgaagatacccgccgccagctgctggacattttacaccagtgggatctgctggacaaaggtggctccggccaccatcatcaccatcactaatga

SEQ ID NO: 4834 - protein, 211 aa, synthetic construct
  REGION 1..211: note = Variant of 3'O-kinase
MAVTIGLTGGIAAGKSTVSAMMRELGLPVIDADEAARAVMKPGEEAYRDIVAEFGPGILRADGEIDRGKLRAIRFSDEQQRKVLNSIVGPAVLKKMLAEWEAHIGSGAKTVVLDIPLLFESGLQSWMDKVLVVYVDDDVQLRRLMARNGLTEEEALMRIRSQWPSAEKVKRADAVIDNNGSIEDTRRQLLDILHQWDLLDKGGSGHHHHHH

SEQ ID NO: 4835 - DNA, 639 bp, synthetic construct
  misc_feature 1..639: note = Variant of 3'O-kinase
  source 1..639: mol_type = other DNA
atggcggttaccattggtttaacaggagggatcgcagcgggcaaatcgactgtgagtgccatgatgcgtgaactgggtctgccggtcatcgatgctgacgaggcagcacgcgccgttatgaagccaggcgaagaagcgtatcgcgacattgtagctgaattcgggccgggcatccttcgtgcggatggcgagatcgatcgcgggaaactgcgtgctatccgcttttcggacgaacaacaacgtaaggtgctgaattcgattgtaggtcctgcagtcctgaagaagatgctcgcggagtgggaagctcatatcgggtcaggcgccaagacggttgtgctggatatcccgctgctgttcgaatccggattgcaatcgtggatggacaaagtactcgtggtgtacgttgatgatgatgttcagttacgccgccttatggcgcgtaacgggtttggggaagaagaagctctgatgcgcattcgttcacagtggccctcggcggagaaagttaaacgtgcagacgctgtcatcgacaataatggcaatattgaagatacccgccgccagctgctggacattttacaccagtgggatctgctggacaaaggtggctccggccaccatcatcaccatcactaatga

SEQ ID NO: 4836 - protein, 211 aa, synthetic construct
  REGION 1..211: note = Variant of 3'O-kinase
MAVTIGLTGGIAAGKSTVSAMMRELGLPVIDADEAARAVMKPGEEAYRDIVAEFGPGILRADGEIDRGKLRAIRFSDEQQRKVLNSIVGPAVLKKMLAEWEAHIGSGAKTVVLDIPLLFESGLQSWMDKVLVVYVDDDVQLRRLMARNGFGEEEALMRIRSQWPSAEKVKRADAVIDNNGNIEDTRRQLLDILHQWDLLDKGGSGHHHHHH

SEQ ID NO: 4837 - DNA, 639 bp, synthetic construct
  misc_feature 1..639: note = Variant of 3'O-kinase
  source 1..639: mol_type = other DNA
atggcggttaccattggtttaacaggaggtatcgcagcgggcaaatcgactgtgagtgccatgatgcgtgaactgggtctgccggtcatcgatgctgacgaggcagcacgcgccgttatgaagccaggcgaagaagcgtatcgcgacattgtagctgaattcgggccgggcatccttgctgcggatggcgagatcgatcgcgggaaactgcgtgctatccgcttttcggacgaacaacaacgtaaggtgctgaattcgattgtaggtcctgcagtcctgaagaagatgctcgcggagtgggaagctcatatcgggtcaggcgccaagacggttgtgctggatatcccgctgctgttcgaatccggattgcaaagttggatggacaaagttctcgtggtgtacgttgatgatgatgttcagttacgccgccttatggcacgtaacgggtttactgaagaagaagctctgatgcgcattcgttcacagtggcccagtgcggagaaagttaaacgtgcagacgctgaaatcgacaataatggcaatattgaagatacccgccgccagctgctggacattttacaccagtgggatctgctggacaaaggtggctccggccaccatcatcaccatcactaatga

SEQ ID NO: 4838 - protein, 211 aa, synthetic construct
  REGION 1..211: note = Variant of 3'O-kinase
MAVTIGLTGGIAAGKSTVSAMMRELGLPVIDADEAARAVMKPGEEAYRDIVAEFGPGILAADGEIDRGKLRAIRFSDEQQRKVLNSIVGPAVLKKMLAEWEAHIGSGAKTVVLDIPLLFESGLQSWMDKVLVVYVDDDVQLRRLMARNGFTEEEALMRIRSQWPSAEKVKRADAEIDNNGNIEDTRRQLLDILHQWDLLDKGGSGHHHHHH

SEQ ID NO: 4839 - DNA, 639 bp, synthetic construct
  misc_feature 1..639: note = Variant of 3'O-kinase
  source 1..639: mol_type = other DNA
atggcggttaccattggtttaacaggagggatcgcagcgggcaaatcgactgtgagtgccatgatgcgtgaactgggtctgccggtcatcgatgctgacgaggcagcacgcgccgttatgaaaccaggcgaagaagcgtatcgcgacattgtagctgaattcgggccgggcatccttcgtgcggatggccgtatcgatcgcgggaaactgcgtgctatccgcttttcggacgaacaacaacgtaaggtgctgaattcgattgtaggtcctgcagtcctgaagaagatgctcgcggagtgggaagctcatatcgggtcaggcgccaagacggttgtgctggatatcccgctgctgttcgaatccggattgcaatcgtggatggacaaagttctcgtggtgtacgttgatgatgatgttcagttacgccgccttatggcacgtaacgggtttactgaagaagaagctctgatgcgcattcgcgtacagtggcccagtgcggagaaagttaaacgtgcagacgctgtcatcgacaataatggcaatattgaagatacccgccgccagctgctggacattttacaccagtgggatctgctggacaaaggtggctccggccaccatcatcaccatcactaatga

SEQ ID NO: 4840 - protein, 211 aa, synthetic construct
  REGION 1..211: note = Variant of 3'O-kinase
MAVTIGLTGGIAAGKSTVSAMMRELGLPVIDADEAARAVMKPGEEAYRDIVAEFGPGILRADGRIDRGKLRAIRFSDEQQRKVLNSIVGPAVLKKMLAEWEAHIGSGAKTVVLDIPLLFESGLQSWMDKVLVVYVDDDVQLRRLMARNGFTEEEALMRIRVQWPSAEKVKRADAVIDNNGNIEDTRRQLLDILHQWDLLDKGGSGHHHHHH

SEQ ID NO: 4841 - DNA, 639 bp, synthetic construct
  misc_feature 1..639: note = Variant of 3'O-kinase
  source 1..639: mol_type = other DNA
atggcggttaccattggtttaacaggagggatcgcagcgggcaaatcgactgtgagtgccatgatgcgtgaactgggtctgccggtcatcgatgctgacgaggcagcacgcgccgttatggcgccaggcgaagaagcgtatcgcgacattgtagctgaattcgggccgggcatccttcgtgcggatggccgtatcgatcgcgggaaactgcgtgctatccgcttttcggacgaacaacaacgtaaggtgctgaattcgattgtaggtcctgcagtcctgaagaagatgctcgcggagtgggaagctatgatcgggtcaggcgccaagacggttgtgctggatattccgggcctgttcgaatccggattgcaatcgtggatggacaaagttctcgtggtgtacgttgatgatgatgttcagttacgccgccttatggcacgtaacgggctgactgaagaagaagctctgatgcgcattaaagtacagtggcccagtgcggagaaagttaaacgtgcagacgctgtcatcgacaataatggcaatattgaagatacccgccgccagctgctggacattttacaccagtgggatctgctggacaaaggtggctccggccaccatcatcaccatcactaatga

SEQ ID NO: 4842 - protein, 211 aa, synthetic construct
  REGION 1..211: note = Variant of 3'O-kinase
MAVTIGLTGGIAAGKSTVSAMMRELGLPVIDADEAARAVMAPGEEAYRDIVAEFGPGILRADGRIDRGKLRAIRFSDEQQRKVLNSIVGPAVLKKMLAEWEAMIGSGAKTVVLDIPGLFESGLQSWMDKVLVVYVDDDVQLRRLMARNGLTEEEALMRIKVQWPSAEKVKRADAVIDNNGNIEDTRRQLLDILHQWDLLDKGGSGHHHHHH

SEQ ID NO: 4843 - DNA, 639 bp, synthetic construct
  misc_feature 1..639: note = Variant of 3'O-kinase
  source 1..639: mol_type = other DNA
atggcggttaccattggtttaacaggagggatcgcagcgggcaaatcgactgtgagtgctatgatgcgtgaactgggtctgccggtcatcgatgctgacgaggcagcacgcgccgttatgaagccaggcgaagaagcgtatcgcgacattgtagctgaattcgggccgggcatccttcgtgcggatggcgagatcgatcgcgggaaactgcgtgctatctttttttcggacgaacaacaacgtaaggtgctgaattcgattgtaggtcctgcagtcctgaagaagatgctcgcggagtgggaagctcacatcgggtcaggcgccaagacggttgtgctggatatcccgctgctgttcgaatccggattgcaatcgtggatggacaaagttctcgtggtgtacgttgatgatgatgttcagttacgccgccttatggcacgtaacgggtttactgaagaagaagctctgatgcgcattcgttcacagtggcccattgcggagaaagttaaacgtgcagacgctgtcatcgacaataatggcaatattgaagatacccgccgccagctgctggacattttacaccagtgggatctgctggacaaaggtggctccggccaccatcatcaccatcactaatga

SEQ ID NO: 4844 - protein, 211 aa, synthetic construct
  REGION 1..211: note = Variant of 3'O-kinase
MAVTIGLTGGIAAGKSTVSAMMRELGLPVIDADEAARAVMKPGEEAYRDIVAEFGPGILRADGEIDRGKLRAIFFSDEQQRKVLNSIVGPAVLKKMLAEWEAHIGSGAKTVVLDIPLLFESGLQSWMDKVLVVYVDDDVQLRRLMARNGFTEEEALMRIRSQWPIAEKVKRADAVIDNNGNIEDTRRQLLDILHQWDLLDKGGSGHHHHHH

SEQ ID NO: 4845 - DNA, 639 bp, synthetic construct
  misc_feature 1..639: note = Variant of 3'O-kinase
  source 1..639: mol_type = other DNA
atggcggttaccattggtttaacaggagggatcgcagcgggcaaatcgactgtgagtgccatgatgcgtgaactgggtctgccggtcatcgatgctgacgaggcagcacgcgccgttatgaaaccaggcgaagaagcgtatcgcgacattgtagctgaattcgggccgggcatccttcgtgcggatggcgagatcgatcgcgggaaactgcgtgacatccgcttttcggacgaacaacaacgtaaggtgctgaattcgattgtaggtcctgcagtcctgaagaagatgctcgcggagtgggaagctatgatcgggtcaggcgccaagacggttgtgctggatatcccgctgctgttcgaatccggattggcctcgtggatggacaaagttctcgtggtgtacgttgatgatgatgttcagttacgccgccttatggcacgtaacgggtttactgaagaagaagctctgatgcgcattaaagtacagtggcccagtgcggagaaagttaaacgtgcagacgctgtcatcgacaataatggcaatattgaagatacccgccgccagctgctggacattttacaccagtgggatctgctggacaaaggtggctccggccaccatcatcaccatcactaatga

SEQ ID NO: 4846 - protein, 211 aa, synthetic construct
  REGION 1..211: note = Variant of 3'O-kinase
MAVTIGLTGGIAAGKSTVSAMMRELGLPVIDADEAARAVMKPGEEAYRDIVAEFGPGILRADGEIDRGKLRDIRFSDEQQRKVLNSIVGPAVLKKMLAEWEAMIGSGAKTVVLDIPLLFESGLASWMDKVLVVYVDDDVQLRRLMARNGFTEEEALMRIKVQWPSAEKVKRADAVIDNNGNIEDTRRQLLDILHQWDLLDKGGSGHHHHHH

SEQ ID NO: 4847 - DNA, 639 bp, synthetic construct
  misc_feature 1..639: note = Variant of 3'O-kinase
  source 1..639: mol_type = other DNA
atggcggttaccattggtttaacaggagggatcgcagcgggcaaatcgactgtgagtgccatgatgcgtgaactgggtctgccggtcatcgatgctgacgaggcagcacgcgccgttatgaagccaggcgaagaagcgtatcgcgacattgtagctgaattcgggccgggcatccttctgcctgatggcgagatcgatcgcgggaaactgcgtgctatccgcttttcggacgaacaacaacgtaaggtgctgaattcgattgtaggtcctgcagtcctgaagaagatgctcgcggagtgggaagctcatatcgggtcaggcgccaagacggttgtgctggatatcccgctgctgttcgaatccggattgcaatcgtggatggacaaagttctcgtggtgtacgttgatgatgatgttcagttacgccgccttatggcacgtaacgggtttactgaagaagaagctctgatgcgcattcgttcacagtggcccagtgcggagaaagttaaacgtgcagacgctgtcatcgacaataatggcaatattgaagatacccgccgccagctgctggacattttacaccagtgggatctgctggacaaaggtggctccggccaccatcatcaccatcactaatga

SEQ ID NO: 4848 - protein, 211 aa, synthetic construct
  REGION 1..211: note = Variant of 3'O-kinase
MAVTIGLTGGIAAGKSTVSAMMRELGLPVIDADEAARAVMKPGEEAYRDIVAEFGPGILLPDGEIDRGKLRAIRFSDEQQRKVLNSIVGPAVLKKMLAEWEAHIGSGAKTVVLDIPLLFESGLQSWMDKVLVVYVDDDVQLRRLMARNGFTEEEALMRIRSQWPSAEKVKRADAVIDNNGNIEDTRRQLLDILHQWDLLDKGGSGHHHHHH

SEQ ID NO: 4849 - DNA, 639 bp, synthetic construct
  misc_feature 1..639: note = Variant of 3'O-kinase
  source 1..639: mol_type = other DNA
atggcggttaccattggtttaacaggaggtatcgcagcgggcaaatcgactgtgagtgccatgatgcgtgaactgggtctgccggtcatcgatgctgacgaggcagcacgcgccgttatgaagccaggcgaagaagcgtatcgcatgattgtagctgaattcgggccgggcatccttcgcgcggatggcgagatcgatcgcagcaaactgcgtgccatccgcttttcggacgaacaacaacgtaaggtgctgaattcgattgtaggtcctgcagtcctgaagaagatgctcgcggagtgggaagctcatatcgggtcaggcgccaagacggttgtgctggatatcccgctgctgttcgaatccggattgcaaagttggatggacaaagttctcgtggtgatggttgatgatgatgttcagttacgccgccttatggcacgtaacgggtttactgaagaagaagctctgatgcgcattcgttcacagtggcccagtgcggagaaagttaaacgtgcagacgctgtaatcgacaataatggcaatattgaagatacccgccgccagctgctggacattttacaccagtgggatctgctggacaaaggtggctccggccaccatcatcaccatcactaatga

SEQ ID NO: 4850 - protein, 211 aa, synthetic construct
  REGION 1..211: note = Variant of 3'O-kinase
MAVTIGLTGGIAAGKSTVSAMMRELGLPVIDADEAARAVMKPGEEAYRMIVAEFGPGILRADGEIDRSKLRAIRFSDEQQRKVLNSIVGPAVLKKMLAEWEAHIGSGAKTVVLDIPLLFESGLQSWMDKVLVVMVDDDVQLRRLMARNGFTEEEALMRIRSQWPSAEKVKRADAVIDNNGNIEDTRRQLLDILHQWDLLDKGGSGHHHHHH

SEQ ID NO: 4851 - DNA, 639 bp, synthetic construct
  misc_feature 1..639: note = Variant of 3'O-kinase
  source 1..639: mol_type = other DNA
atggcggttaccattggtttaacaggagggatcgcagcgggcaaatcgactgtgagtgccatgatgcgtgaactgggtctgccggtcatcgatgctgacgaggcagcacgcgcctgtatgaagccaggcgaagaagcgtatcgcgacattgtagctgaattcgggccgggcatccttcgtgcggatggcgagatcgatcgcgggaaactgcgtgctatccgcttttcggacgaacaacaacgtaaggtgctgaattcgattgtaggtcctgcagtcctgaagaaaatgctcgcggagtgggaagctcatatcgggtcaggcgccaagacggttgtgctggatatcccgctgctgttcgaatccggattgcaatcgtggatggacaaagtactcgtggtgtacgttgatgatgatgttcagttacgccgccttatggcacgtaacgggtttactgaagaagaagctctgatgcgcattcgttcacagtggcccagtgcggagaaagttaaacgtgcagacgctgtcatcgacaataatggcaatattgaagatacccgccgccagctgctggacattttacaccagtgggatctgctggacaaaggtggctccggccaccatcatcaccatcactaatga

SEQ ID NO: 4852 - protein, 211 aa, synthetic construct
  REGION 1..211: note = Variant of 3'O-kinase
MAVTIGLTGGIAAGKSTVSAMMRELGLPVIDADEAARACMKPGEEAYRDIVAEFGPGILRADGEIDRGKLRAIRFSDEQQRKVLNSIVGPAVLKKMLAEWEAHIGSGAKTVVLDIPLLFESGLQSWMDKVLVVYVDDDVQLRRLMARNGFTEEEALMRIRSQWPSAEKVKRADAVIDNNGNIEDTRRQLLDILHQWDLLDKGGSGHHHHHH

SEQ ID NO: 4853 - DNA, 639 bp, synthetic construct
  misc_feature 1..639: note = Variant of 3'O-kinase
  source 1..639: mol_type = other DNA
atggcggttaccattggtttaacaggagggatcgcagcgggcaaatcgactgtgagtgccatgatgcgtgaactgggttttccggtcatcgatgctgacgaggcagcacgcgccgttatgaagccaggcgaagaagcgtatcgccaaattgtagctgaattcgggccgggcatccttcgtgcggatggcgagatcgatcgcggcaaactgcgtgccatccacttttcggacgaacaacaacgtaaggtcctgaattcgattgtaggtcctgcagtcctgaagaagatgctcgcggagtgggaagctcatatcgggtcaggcgccaagacggttgtgctggatatcccgctgctgttcgaatccggattgcaatcgtggatggacaaagttctcgtggtgtacgttgatgatgatgttcagttacgccgccttatggcacgtaacgggtttactgaagaagaagctctgatgcgcattcgttcacagtggcccagtgcggagaaagttaaacgtgcagacgctgtcatcgacaataatggcaatattgaagatacccgccgccagctgctggacattttacaccagtgggatctgctggacaaaggtggctccggccaccatcatcaccatcactaatga

SEQ ID NO: 4854 - protein, 211 aa, synthetic construct
  REGION 1..211: note = Variant of 3'O-kinase
MAVTIGLTGGIAAGKSTVSAMMRELGFPVIDADEAARAVMKPGEEAYRQIVAEFGPGILRADGEIDRGKLRAIHFSDEQQRKVLNSIVGPAVLKKMLAEWEAHIGSGAKTVVLDIPLLFESGLQSWMDKVLVVYVDDDVQLRRLMARNGFTEEEALMRIRSQWPSAEKVKRADAVIDNNGNIEDTRRQLLDILHQWDLLDKGGSGHHHHHH

SEQ ID NO: 4855 - DNA, 639 bp, synthetic construct
  misc_feature 1..639: note = Variant of 3'O-kinase
  source 1..639: mol_type = other DNA
atggcggttaccattggtttaacaggagggatcgcagcgggcaaatcgactgtgagtgccatgatgcgtgaactgggtctgccggtcatcgatgctgacgaggcagcacgcgccgttatgaagccaggcgaagaagcgtatcgcgacattgtagctgaattcgggccgggcatccttcgtgcggatggcgagatcgatcgcgggaaactgcgtgctatccgtttttcggacgaacaacaacgtaaggtgctgaattcgattgtaggtcctgcagtcctgaagaagatgctcgcggagtgggaagctcatatcgggtcaggcgccaagacggttgtgctggatatcccgctgctgttcgaatccggattgcaatcgtggatggacaaagttctcgtggtgtacgttgatgatgatgttcagttacgccgccttatggcacgtaacgggtttactgaagaagaagctctgatgcgcattcgttcacagtggcccagtgcggagaaagttaaacgtgcagacgctgtcatcgacaataatggcaatgaggaagatacccgccgccagctgctggacattttacaccagtgggatctgctggacaaaggtggctccggccaccatcatcaccatcactaatga

SEQ ID NO: 4856 - protein, 211 aa, synthetic construct
  REGION 1..211: note = Variant of 3'O-kinase
MAVTIGLTGGIAAGKSTVSAMMRELGLPVIDADEAARAVMKPGEEAYRDIVAEFGPGILRADGEIDRGKLRAIRFSDEQQRKVLNSIVGPAVLKKMLAEWEAHIGSGAKTVVLDIPLLFESGLQSWMDKVLVVYVDDDVQLRRLMARNGFTEEEALMRIRSQWPSAEKVKRADAVIDNNGNEEDTRRQLLDILHQWDLLDKGGSGHHHHHH

SEQ ID NO: 4857 - DNA, 639 bp, synthetic construct
  misc_feature 1..639: note = Variant of 3'O-kinase
  source 1..639: mol_type = other DNA
atggcggttaccattggtttaacaggaagtatcgcagcgggcaaatcgactgtgagtgccatgatgcgtgaactgggtctgccggtcatcgatgctgacgaggcagcacgcgccgttatgaagccaggcgaagaagcgtatcgcgacattgtagctgaattcgggccgggcatccttcgcgcggatggcgagatcgatcgcgggaaactgcgtgctatccgcttttcggacgaacaacaacgtaagcgcctgaattcgattgtaggtcctgcagtcctgaagaagatgctcgcggagtgggaagctcatatcgggtcaggcgccaagacggttgtgctggatatcccgctgctgttcgaatccggattgcaatcgtggatggacaaagttctcgtggtgtacgttgatgatgatgttcagttacgccgccttatggcacgtaacgggtttactgaagaagaagctctgatgcgcattcgttcacagtggcccagtgcggagaaagttaaacgtgcagacgctgtcatcgacaataatggcaatattgaagatacccgccgccagctgctggacattttacaccagtgggatctgctggacaaaggtggctccggccaccatcatcaccatcactaatga

SEQ ID NO: 4858 - protein, 211 aa, synthetic construct
  REGION 1..211: note = Variant of 3'O-kinase
MAVTIGLTGSIAAGKSTVSAMMRELGLPVIDADEAARAVMKPGEEAYRDIVAEFGPGILRADGEIDRGKLRAIRFSDEQQRKRLNSIVGPAVLKKMLAEWEAHIGSGAKTVVLDIPLLFESGLQSWMDKVLVVYVDDDVQLRRLMARNGFTEEEALMRIRSQWPSAEKVKRADAVIDNNGNIEDTRRQLLDILHQWDLLDKGGSGHHHHHH

SEQ ID NO: 4859 - DNA, 639 bp, synthetic construct
  misc_feature 1..639: note = Variant of 3'O-kinase
  source 1..639: mol_type = other DNA
atggcggttaccattggtttaacaggaggtatcgcagcgggcaaatcgactgtgagtgccatgatggcagaactgggttttccggtcatcgatgctgacgaggcagcacgcgcggttatgaagccaggcgaagaagcgtatcgccaaattgtagctgaattcgggccgggcatccttcgcgcggatggcgagatcgatcgcggcaaactgcgtgccatccgcttttcggacgaacaacaacgtaagcgcctgaattcgattgtaggtcctgcagtcctgaagaagatgctcgcggagtgggaagctcatatcgggtcaggcgccaagacggttgtgctggatatcccgctgctgttcgaatccggattgcaagagtggatggacaaagttctcgtggtgtacgttgatgatgatgttcagattcgccgccttatggcacgtaacgggtttactgaagaagaagctctgatgcgcattcgttcacagtggcccagtgcggagaaagttaaacgtgcagacgctgtcatcgacaataatggcaatattgaagatacccgccgccagctgctggacattttacaccagtgggatctgctggacaaaggtggctccggccaccatcatcaccatcactaatga

SEQ ID NO: 4860 - protein, 211 aa, synthetic construct
  REGION 1..211: note = Variant of 3'O-kinase
MAVTIGLTGGIAAGKSTVSAMMAELGFPVIDADEAARAVMKPGEEAYRQIVAEFGPGILRADGEIDRGKLRAIRFSDEQQRKRLNSIVGPAVLKKMLAEWEAHIGSGAKTVVLDIPLLFESGLQEWMDKVLVVYVDDDVQIRRLMARNGFTEEEALMRIRSQWPSAEKVKRADAVIDNNGNIEDTRRQLLDILHQWDLLDKGGSGHHHHHH

SEQ ID NO: 4861 - DNA, 639 bp, synthetic construct
  misc_feature 1..639: note = Variant of 3'O-kinase
  source 1..639: mol_type = other DNA
atggcggttaccattggtttaacaggagggatcgcagcgggcaaatcgactgtgagtgccatgatgcgtgaactgggtctgccggtcatcgatgctgacgaggcagcacgcgccgttatgaaaccaggcgaagaagcgtatcgcgacattgtagctgaattcgggccgggcatccttcgtgcggatggcgagatcgatcgcgggaaactgcgtgacatccgcttttcggacgaacaacaacgtaaggtgctgaattcgattgtaggtcctgcagtcctgaagaagatgctcgcggagtgggaagctcatatcgggtcaggcgccaagacggttgtgctggatatcccgctgctgttcgaatccggattgtactcgtggatggacaaagttctcgtggtgtacgttgatgatgatgttcagttacgccgccttatggcacgtaacgggctgactgaagaagaagctctgatgcgcattagctcgcagtggcccagtgcggagaaagttaaacgtgcagacgctgtcatcgacaataatggcgtgattgaagatacccgccgccagctgctggacattttacaccagtgggatctgctggacaaaggtggctccggccaccatcatcaccatcactaatga

SEQ ID NO: 4862 - protein, 211 aa, synthetic construct
  REGION 1..211: note = Variant of 3'O-kinase
MAVTIGLTGGIAAGKSTVSAMMRELGLPVIDADEAARAVMKPGEEAYRDIVAEFGPGILRADGEIDRGKLRDIRFSDEQQRKVLNSIVGPAVLKKMLAEWEAHIGSGAKTVVLDIPLLFESGLYSWMDKVLVVYVDDDVQLRRLMARNGLTEEEALMRISSQWPSAEKVKRADAVIDNNGVIEDTRRQLLDILHQWDLLDKGGSGHHHHHH

SEQ ID NO: 4863 - DNA, 639 bp, synthetic construct
  misc_feature 1..639: note = Variant of 3'O-kinase
  source 1..639: mol_type = other DNA
atggcggttaccattggtttaacaggagggatcgcagcgggcaaatcgactgtgagtgccatgatgcgtgaactgggtctgccggtcatcgatgctgacgaggcagcacgcgccgttatgaaaccaggcgaagaagcgtatcgcgacattgtagctgaattcgggccgggcatccttcgtgcggatggcgagatcgatcgcgggaaactgcgtgctatccgcttttcggacgaacaacaacgtaaggtgctgaattcgattgtaggtcctgcagtcctgaagaagatgctcgcggagtgggaagctcatatcgggtcaggcgccaagacggttgtgctggatattccgctgctgttcgaatccggattgcaatcgtggatggacaaagttctcgtggtgtacgttgatgatgatgttcagttacgccgccttatggcacgtaacgggtttactgaagaagaagctctgatgcgcattaaatcgcagtggcccagtgcggagaaagttaaacgtgcagacgctgtcatcgacaataatggcaccattgaagatacccgccgccagctgctggacattttacaccagtgggatctgctggacaaaggtggctccggccaccatcatcaccatcactaatga

SEQ ID NO: 4864 - protein, 211 aa, synthetic construct
  REGION 1..211: note = Variant of 3'O-kinase
MAVTIGLTGGIAAGKSTVSAMMRELGLPVIDADEAARAVMKPGEEAYRDIVAEFGPGILRADGEIDRGKLRAIRFSDEQQRKVLNSIVGPAVLKKMLAEWEAHIGSGAKTVVLDIPLLFESGLQSWMDKVLVVYVDDDVQLRRLMARNGFTEEEALMRIKSQWPSAEKVKRADAVIDNNGTIEDTRRQLLDILHQWDLLDKGGSGHHHHHH

SEQ ID NO: 4865 - DNA, 639 bp, synthetic construct
  misc_feature 1..639: note = Variant of 3'O-kinase
  source 1..639: mol_type = other DNA
atggcggttaccattggtttaacaggagggatcgcagcgggcaaatcgactgtgagtgccatgatgcgtgaactgggtctgccggtcatcgatgctgacgaggcagcacgcgccgttatgaaaccaggcgaagaagcgtatcgcgacattgtagctgaattcgggccgggcatccttcgtgcggatggccgtatcgatcgcgggaaactgcgtgctatccgcttttcggacgaacaacaacgtaaggtgctgaattcgattgtaggtcctgcagtcctgaagaagatgctcgcggagtgggaagctcatatcgggtcaggcgccaagacggttgtgctggatatcccgctgctgttcgaatccggattgcaatcgtggatggacaaagttctcgtggtgtacgttgatgatgatgttcagttacgccgccttatggcacgtaacgggtttactgaagaagaagctctgatgcgcattcgttcacagtggcccagtgcggagaaagttaaacgtgcagacgctgtcatcgacaataatggcaacattgaagatacccgccgccagctgctggacattttacaccagtgggatctgctggacaaaggtggctccggccaccatcatcaccatcactaatga

SEQ ID NO: 4866 - protein, 211 aa, synthetic construct
  REGION 1..211: note = Variant of 3'O-kinase
MAVTIGLTGGIAAGKSTVSAMMRELGLPVIDADEAARAVMKPGEEAYRDIVAEFGPGILRADGRIDRGKLRAIRFSDEQQRKVLNSIVGPAVLKKMLAEWEAHIGSGAKTVVLDIPLLFESGLQSWMDKVLVVYVDDDVQLRRLMARNGFTEEEALMRIRSQWPSAEKVKRADAVIDNNGNIEDTRRQLLDILHQWDLLDKGGSGHHHHHH

SEQ ID NO: 4867 - DNA, 639 bp, synthetic construct
  misc_feature 1..639: note = Variant of 3'O-kinase
  source 1..639: mol_type = other DNA
atggcggttaccattggtttaacaggagggatcgcagcgggcaaatcgactgtgagtgccatgatgcgtgaactgggtctgccggtcatcgatgctgacgaggcagcacgcgccgttatgaagccaggcgaagaagcgtatcgcgacattgtagcggaattcgggccgggcatccttcgccctgatggcgagatcgatcgcgggaaactgcgtgctatccgcttttcggacgaacaacaacgtaaggtgctgaattcgattgtaggtcctgcagtcctgaagaagatgctcgcggagtgggaagctcatatcgggtcaggcgccaaggcggttgtgctggatatcccgctgctgttcgaatccggattgcaatcgtggatggacaaagttctcgtggtgtacgttgatgatgatgttcagttacgccgccttatgcatcgtaacgggtttggggaagaagaagctctgatgcgcattcgttcacagtggcccagtgcggagaaagttaaacgtgcagacgctgtcatcgacaataatggcaatattgaagatacccgccgccagctgctggacattttacaccagtgggatctgctggacaaaggtggctccggccaccatcatcaccatcactaatga

SEQ ID NO: 4868 - protein, 211 aa, synthetic construct
  REGION 1..211: note = Variant of 3'O-kinase
MAVTIGLTGGIAAGKSTVSAMMRELGLPVIDADEAARAVMKPGEEAYRDIVAEFGPGILRPDGEIDRGKLRAIRFSDEQQRKVLNSIVGPAVLKKMLAEWEAHIGSGAKAVVLDIPLLFESGLQSWMDKVLVVYVDDDVQLRRLMHRNGFGEEEALMRIRSQWPSAEKVKRADAVIDNNGNIEDTRRQLLDILHQWDLLDKGGSGHHHHHH

SEQ ID NO: 4869 - DNA, 639 bp, synthetic construct
  misc_feature 1..639: note = Variant of 3'O-kinase
  source 1..639: mol_type = other DNA
atggcggttaccattggtttaacaggaagtatcgcagcgggcaaatcgactgtgagtgccatgatggcagaactgggttttccggtcatcgatgctgacgaggcagcacgctcggttatgaagccaggcgaagaagcgtatcgccaaattgtagctgaattcgggccgggcatccttcgtgcggatggcgagatcgatcgcgggaaactgcgtgctatccgcttttcggacgaacaacaacgtaaggtcctgaattcgattgtaggtcctgcagtcctgaagaagatgctcgcggagtgggaagctcatatcgggtcaggcgccaagacggttgtggccgatatcccgctgctgttcgaatccggattgcaaagttggatggacaaagttctcgtggtgtacgttgatgatgatgttcagctgcgccgccttatggcacgtaacgggtttactgaagaagaagctctgatgcgcattcgttcacagtggcccagtgcggagaaagttaaacgtgcagacgctgtaatcgacaataatggcaatattgaagatacccgccgccagctgctggacattttacaccagtgggatctgctggacaaaggtggctccggccaccatcatcaccatcactaatga

SEQ ID NO: 4870 - protein, 211 aa, synthetic construct
  REGION 1..211: note = Variant of 3'O-kinase
MAVTIGLTGSIAAGKSTVSAMMAELGFPVIDADEAARSVMKPGEEAYRQIVAEFGPGILRADGEIDRGKLRAIRFSDEQQRKVLNSIVGPAVLKKMLAEWEAHIGSGAKTVVADIPLLFESGLQSWMDKVLVVYVDDDVQLRRLMARNGFTEEEALMRIRSQWPSAEKVKRADAVIDNNGNIEDTRRQLLDILHQWDLLDKGGSGHHHHHH

SEQ ID NO: 4871 - DNA, 639 bp, synthetic construct
  misc_feature 1..639: note = Variant of 3'O-kinase
  source 1..639: mol_type = other DNA
atggcggttaccattggtttaacaggaggtatcgcagcgggcaaatcgactgtgagtgccatgatgcgtgaactgggtctgccggtcatcgatgctgacgaggcagcacgcgccgttatgaagccaggcgaagaagcgtatcgcatgattgtagctgaattcgggccgggcatccttgctgcggatggcgagatcgatcgcgggaaactgcgtgctatccgcttttcggacgaacaacaacgtaaggtcctgaattcgattgtaggtcctgcagtcctgaagaagatgctcgcggagtgggaagctcatatcgggtcaggcgccaagacggttgtgctggatatcccgctgctgttcgaatccggattgcaatcgtggatggacaaagttctcgtggtgtacgttgatgatgatgttcagttacgccgccttatggcacgtaacgggtttactgaagaagaagctctgatgcgcattcgttcacagtggcccagtgcggagaaagttaaacgtgcagacgctgtaatcgacaataatggcaatattgaagatacccgccgccagctgctggacattttacaccagtgggatctgctggacaaaggtggctccggccaccatcatcaccatcactaatga

SEQ ID NO: 4872 - protein, 211 aa, synthetic construct
  REGION 1..211: note = Variant of 3'O-kinase
MAVTIGLTGGIAAGKSTVSAMMRELGLPVIDADEAARAVMKPGEEAYRMIVAEFGPGILAADGEIDRGKLRAIRFSDEQQRKVLNSIVGPAVLKKMLAEWEAHIGSGAKTVVLDIPLLFESGLQSWMDKVLVVYVDDDVQLRRLMARNGFTEEEALMRIRSQWPSAEKVKRADAVIDNNGNIEDTRRQLLDILHQWDLLDKGGSGHHHHHH

SEQ ID NO: 4873 - DNA, 639 bp, synthetic construct
  misc_feature 1..639: note = Variant of 3'O-kinase
  source 1..639: mol_type = other DNA
atggcggttaccattggtttaacaggaggtatcgcagcgggcaaatcgactgtgagtgccatgatgcgtgaactgggtctgccggtcatcgatgctgacgaggcagcacgcgcggttatgaagccaggcgaagaagcgtatcgccaaattgtagctgaattcgggccgggcatccttcgcgcggatggcgcgatcgatcgcgggaaactgcgtgctatccgcttttcggacgaacaacaacgtaaggtcctgaattcgattgtaggtcctgcagtcctgaagaagacgctcgcggagtgggaagctcatatcgggtcaggcgccaagacggttgtggccgatatcccgctgctgttcgaatccggattgcaatcgtggatggacaaagttctcgtggtgtacgttgatgatgatgttcagttacgccgccttatggcacgtaacgggtttactgaagaagaagctctgatgcgcattcgttcacagtggcccagtgcggagaaagttaaacgtgcagacgctgaaatcgacaataatggcaatattgaagatacccgccgccagctgctggacattttacaccagtgggatctgctggacaaaggtggctccggccaccatcatcaccatcactaatga

SEQ ID NO: 4874 - protein, 211 aa, synthetic construct
  REGION 1..211: note = Variant of 3'O-kinase
MAVTIGLTGGIAAGKSTVSAMMRELGLPVIDADEAARAVMKPGEEAYRQIVAEFGPGILRADGAIDRGKLRAIRFSDEQQRKVLNSIVGPAVLKKTLAEWEAHIGSGAKTVVADIPLLFESGLQSWMDKVLVVYVDDDVQLRRLMARNGFTEEEALMRIRSQWPSAEKVKRADAEIDNNGNIEDTRRQLLDILHQWDLLDKGGSGHHHHHH

SEQ ID NO: 4875 - DNA, 639 bp, synthetic construct
  misc_feature 1..639: note = Variant of 3'O-kinase
  source 1..639: mol_type = other DNA
atggcggttaccattggtttaacaggagggatcgcagcgggcaaatcgactgtgagtgccatgatgcgtgaactgggtctgccggtcatcgatgctgacgaggcagcacgcgccgttatgaagccaggcgaagaagcgtatcgcgacattgtagctgaattcgggccgggcatccttcgccctgatggcgagatcgatcgcgggaaactgcgtgctatccgcttttcggacgaacaacaacgtaaggtgctgaattcgattgtaggtcctgcagtcctgaagaagatgctcgcggagtgggaagctcatatcgggtcaggcgccaaggcggttgtgctggatatcccgctgctgttcgaatccggattgcaatcgtggatggacaaagttctcgtggtgtacgttgatgatgatgttcagttacgccgccttatggcacgtaacgggtttactgaagaagaagctctgatgcgcattcgttcacagtggccccaagcggagaaagttaaacgtgcagacgctgtcatcgacaataatggcaatattgaagatacccgccgccagctgctggacattttacaccagtgggatctgctggacaaaggtggctccggccaccatcatcaccatcactaatga

SEQ ID NO: 4876 - protein, 211 aa, synthetic construct
  REGION 1..211: note = Variant of 3'O-kinase
MAVTIGLTGGIAAGKSTVSAMMRELGLPVIDADEAARAVMKPGEEAYRDIVAEFGPGILRPDGEIDRGKLRAIRFSDEQQRKVLNSIVGPAVLKKMLAEWEAHIGSGAKAVVLDIPLLFESGLQSWMDKVLVVYVDDDVQLRRLMARNGFTEEEALMRIRSQWPQAEKVKRADAVIDNNGNIEDTRRQLLDILHQWDLLDKGGSGHHHHHH

SEQ ID NO: 4877 - DNA, 639 bp, synthetic construct
  misc_feature 1..639: note = Variant of 3'O-kinase
  source 1..639: mol_type = other DNA
atggcggttaccattggtttaacaggagggatcgcagcgggcaaatcgactgtgagttgcatgatgcgtgaactgggtctgccggtcatcgatgctgacgaggcagcacgcgccgttatgaagccaggcgaagaagcgtatcgcgacattgtagctgaattcgggccgggcatccttcgtgcggatggcgagatcgatcgcgggaaactgcgtgctatccgcttttcggacgaacaacaacgtaaggtgctgaattcgattgtaggtcctgcagtcctgaagaagatgctcgcggagtgggaagctctgatcgggtcaggcgccaagacggttgtgctggatatcccgctgctgttcgaatccggattgcaatcgtggatggacaaagttctcgtggtgtacgttgatgatgatgttcagttacgccgccttatggcacgtaacgggtttactgaagaagaagctctgatgcgcattcgttcacagtggcccagtgcggagaaagttaaacgtgcagacgctgtcatcgacaataatggcaatattgaagatacccgccgccagctgctggacctgttacaccagtgggatctgctggacaaaggtggctccggccaccatcatcaccatcactaatga

SEQ ID NO: 4878 - protein, 211 aa, synthetic construct
  REGION 1..211: note = Variant of 3'O-kinase
MAVTIGLTGGIAAGKSTVSCMMRELGLPVIDADEAARAVMKPGEEAYRDIVAEFGPGILRADGEIDRGKLRAIRFSDEQQRKVLNSIVGPAVLKKMLAEWEALIGSGAKTVVLDIPLLFESGLQSWMDKVLVVYVDDDVQLRRLMARNGFTEEEALMRIRSQWPSAEKVKRADAVIDNNGNIEDTRRQLLDLLHQWDLLDKGGSGHHHHHH

SEQ ID NO: 4879 - DNA, 639 bp, synthetic construct
  misc_feature 1..639: note = Variant of 3'O-kinase
  source 1..639: mol_type = other DNA
atggcggttaccattggtttaacaggagggatcgcagcgggcaaatcgactgtgagtgccatgatgcgtgaactgggtctgccggtcatcgatgctgacgaggcagcacgcgccgttatgaagccaggcgaagaagcgtatcgcgacattgtatcggaattcgggccgggcatccttcgccctgatggcgagatcgatcgcgggaaactgcgtgctatccgcttttcggacgaacaacaacgtaaggtgctgaattcgattgtaggtcctgcagtcctgaagaagatgctcgcggagtgggaagctcatatcgggtcaggcgccaagacggttgtgctggatatcccgctgctgttcgaatccggattgcaatcgtggatggacaaagttctcgtggtgtacgttgatgatgatgttcagttacgccgccttatggcacgtaacgggtttactgaagaagaagctctgatgcgcattcgttcacagtggcccagtgcggagaaagttaaacgtgcagacgctgtcatcgacaataatggcaatattgaagatacccgccgccagctgctggacattttacaccagtgggatctgctggacaaaggtggctccggccaccatcatcaccatcactaatga

SEQ ID NO: 4880 - protein, 211 aa, synthetic construct
  REGION 1..211: note = Variant of 3'O-kinase
MAVTIGLTGGIAAGKSTVSAMMRELGLPVIDADEAARAVMKPGEEAYRDIVSEFGPGILRPDGEIDRGKLRAIRFSDEQQRKVLNSIVGPAVLKKMLAEWEAHIGSGAKTVVLDIPLLFESGLQSWMDKVLVVYVDDDVQLRRLMARNGFTEEEALMRIRSQWPSAEKVKRADAVIDNNGNIEDTRRQLLDILHQWDLLDKGGSGHHHHHH

SEQ ID NO: 4881 - DNA, 639 bp, synthetic construct
  misc_feature 1..639: note = Variant of 3'O-kinase
  source 1..639: mol_type = other DNA
atggcggttaccattggtttaacaggagggatcgcagcgggcaaatcgactgtgagtgccatgatgcgtgaactgggtctgccggtcatcgatgctgacgaggcagcacgcgccgttatgaaaccaggcgaagaagcgtatcgcgacattgtagctgaattcgggccgggcatccttcgtgcggatggcgagatcgatcgcgggaaactgcgtgacatccgcttttcggacgaacaacaacgtaaggtgctgaattcgattgtaggtcctgcagtcctgaagaagatgctcgcggagtgggaagctcatatcgggtcaggcgccaagacggttgtgctggatatcccgctgctgttcgaatccggattgcaatcgtggatggacaaagttctcgtggtgtacgttgatgatgatgttcagttacgccgccttatggcacgtaacgggtttactgaagaagaagctctgatgcgcattcgttcacagtggcccagtgcggagaaagttaaacgtgcagacgctgtcatcgacaataatggcaatattgaagatacccgccgccagctgctggacattttacaccagtgggatctgctggacaaaggtggctccggccaccatcatcaccatcactaatga

SEQ ID NO: 4882 - protein, 211 aa, synthetic construct
  REGION 1..211: note = Variant of 3'O-kinase
MAVTIGLTGGIAAGKSTVSAMMRELGLPVIDADEAARAVMKPGEEAYRDIVAEFGPGILRADGEIDRGKLRDIRFSDEQQRKVLNSIVGPAVLKKMLAEWEAHIGSGAKTVVLDIPLLFESGLQSWMDKVLVVYVDDDVQLRRLMARNGFTEEEALMRIRSQWPSAEKVKRADAVIDNNGNIEDTRRQLLDILHQWDLLDKGGSGHHHHHH

SEQ ID NO: 4883 - DNA, 639 bp, synthetic construct
  misc_feature 1..639: note = Variant of 3'O-kinase
  source 1..639: mol_type = other DNA
atggcggttaccattggtttaacaggagggatcgcagcgggcaaatcgactgtgagtgccatgatgcgtgaactgggtctgccggtcatcgatgctgacgaggcagcacgcgccgttatgaagccaggcgaagaagcgtatcgcgacattgtagctgaattcgggccgggcatccttcgtgcggatggcgagatcgatcgcgagaaactgcgtgctatccgcttttcggacgaacaacaacgtaaggtgctgaattcgattgtaggtcctgcagtcctgaagaagatgctcgcggagtgggaagctcatatcgggtcaggcgccaagacggttgtgctggatatcccgctgctgttcgaatccggattgcaatcgtggatggacaaagttctcgtggtgtacgttgatgatgatgttcagttacgccgccttatggcacgtaacgggtttactgaagaagaagctctgatgcgcattcgttcacagtggcccagtgcggagaaagttaaacgtgcagacgctgtcatcgacaataatggcaatattgaagatacccgccgccagctgctggacattttacaccagtgggatctgctggacaaaggtggctccggccaccatcatcaccatcactaatga

SEQ ID NO: 4884 - protein, 211 aa, synthetic construct
  REGION 1..211: note = Variant of 3'O-kinase
MAVTIGLTGGIAAGKSTVSAMMRELGLPVIDADEAARAVMKPGEEAYRDIVAEFGPGILRADGEIDREKLRAIRFSDEQQRKVLNSIVGPAVLKKMLAEWEAHIGSGAKTVVLDIPLLFESGLQSWMDKVLVVYVDDDVQLRRLMARNGFTEEEALMRIRSQWPSAEKVKRADAVIDNNGNIEDTRRQLLDILHQWDLLDKGGSGHHHHHH

SEQ ID NO: 4885 - DNA, 639 bp, synthetic construct
  misc_feature 1..639: note = Variant of 3'O-kinase
  source 1..639: mol_type = other DNA
atggcggttaccattggtttaacaggagggatcgcagcgggcaaatcgactgtgagtgccatgatgcgtgaactgggtctgccggtcatcgatgctgacgaggcagcacgcgccgttatgaagccaggcgaagaagcgtatcgcgacattgtagctgaattcgggccgggcatccttcgtgcggatggcgagatcgatcgcgggaaactgcgtgctatccgcttttcggacgaacaacaacgtaaggtgctgaattcgattgtaggtcctgcagtcctgaagaagatgctcgcggagtgggaagctcatatcgggtcaggcgccaagacggttgtgctggatatcccgctgctgttcgaatccggattgcaatcgtggatggacaaagttctcgtggtgtacgttgatgatgatgttcagttacgccgccttatggcacgtggggggtttactgaagaagaagctctgatgcgcattcgttcacagtggcccagtgcggagaaagttaaacgtgcagacgctgtcatcgacaataatggcaatattgaagatacccgccgccagctgctggacattttacaccagtgggatctgctggacaaaggtggctccggccaccatcatcaccatcactaatga

SEQ ID NO: 4886 - protein, 211 aa, synthetic construct
  REGION 1..211: note = Variant of 3'O-kinase
MAVTIGLTGGIAAGKSTVSAMMRELGLPVIDADEAARAVMKPGEEAYRDIVAEFGPGILRADGEIDRGKLRAIRFSDEQQRKVLNSIVGPAVLKKMLAEWEAHIGSGAKTVVLDIPLLFESGLQSWMDKVLVVYVDDDVQLRRLMARGGFTEEEALMRIRSQWPSAEKVKRADAVIDNNGNIEDTRRQLLDILHQWDLLDKGGSGHHHHHH

SEQ ID NO: 4887 - DNA, 639 bp, synthetic construct
  misc_feature 1..639: note = Variant of 3'O-kinase
  source 1..639: mol_type = other DNA
atggcggttaccattggtttaacaggagggatcgcagcgggcaaatcgactgtgagtgccatgatgcgtgaactgggtctgccggtcatcgatgctgacgaggcagcacgcgccgttatgaagccaggcgaagaagcgtatcgcgacattgtagctgaattcgggccgggcatccttcgtgcggatggcgagatcgatcgcgggaaactgcgtgctatccgcttttcggacgaacaacaacgtaaggtgctgaattcgattgtaggtcctgcagtcctgaagaagatgctcgcggagtgggaagctcatatcgggtcaggcgccaagacggttgtgctggatatcccgctgctgttcgaatccggattgcaatcgtggatggacaaagttctcgtggtgtacgttgatgatgatgttcagttacgccgccttatggcacgtaacgggcttactgaagaagaagctctgatgcgcattcgttcacagtggcccagtgcggagaaagttaaacgtgcagacgctgtcatcgacaataatggcaatattgaagatacccgccgccagctgctggacattttacaccagtgggatctgctggacaaaggtggctccggccaccatcatcaccatcactaatga

SEQ ID NO: 4888 - protein, 211 aa, synthetic construct
  REGION 1..211: note = Variant of 3'O-kinase
MAVTIGLTGGIAAGKSTVSAMMRELGLPVIDADEAARAVMKPGEEAYRDIVAEFGPGILRADGEIDRGKLRAIRFSDEQQRKVLNSIVGPAVLKKMLAEWEAHIGSGAKTVVLDIPLLFESGLQSWMDKVLVVYVDDDVQLRRLMARNGLTEEEALMRIRSQWPSAEKVKRADAVIDNNGNIEDTRRQLLDILHQWDLLDKGGSGHHHHHH

SEQ ID NO: 4889 - DNA, 639 bp, synthetic construct
  misc_feature 1..639: note = Variant of 3'O-kinase
  source 1..639: mol_type = other DNA
atggcggttaccattggtttaacaggagggatcgcagcgggcaaatcgactgtgagtgccatgatgcgtgaactgggtctgccggtcatcgatgctgacgaggcagcacgcgccgttatgaagccaggcgaagaagcgtatcgcgacattgtagctgaattcgggccgggcatccttcgtgcggatggcgagatcgatcgcgggaaactgcgtgctatccgcttttcggacgaacaacaacgtaaggtgctgaattcgattgtaggtcctgcagtcctgaagaagatgctcgcggagtgggaagctcatatcgggtcaggcgccaagacggttgtgctggatatcccgctgctgttcgaatccggattgcaatcgtggatggacaaagttctcgtggtgtacgttgatgatgatgttcagttacgccgccttatggcacgtaacgggtttactgaagaagaagctctgatgcgcattcgttcacagtggcccagtgcggagaaagttaaacgtgcagacgctgtcatcgacaataatggcaatagggaagatacccgccgccagctgctggacattttacaccagtgggatctgctggacaaaggtggctccgaccaccatcatcaccatcactaatga

SEQ ID NO: 4890 - protein, 211 aa, synthetic construct
  REGION 1..211: note = Variant of 3'O-kinase
MAVTIGLTGGIAAGKSTVSAMMRELGLPVIDADEAARAVMKPGEEAYRDIVAEFGPGILRADGEIDRGKLRAIRFSDEQQRKVLNSIVGPAVLKKMLAEWEAHIGSGAKTVVLDIPLLFESGLQSWMDKVLVVYVDDDVQLRRLMARNGFTEEEALMRIRSQWPSAEKVKRADAVIDNNGNREDTRRQLLDILHQWDLLDKGGSDHHHHHH

SEQ ID NO: 4891 - DNA, 639 bp, synthetic construct
  misc_feature 1..639: note = Variant of 3'O-kinase
  source 1..639: mol_type = other DNA
atggcggttaccattggtttaacaggagggatcgcagcgggcaaatcgactgtgagtgccatgatgcgtgaactgggtctgccggtcatcgatgctgacgaggcagcacgcgccgttatgaagccaggcgaagaagcgtatcgcgacattgtagctgaattcgggccgggcatccttcgtgcggatggcgagatcgatcgcgggaaactgcgtgctatccgcctgtcggacgaacaacaacgtaaggtgctgaattcgattgtaggtcctgcagtcctgaagaagatgctcgcggagtgggaagctcatatcgggtcaggcgccaagacggttgtgctggatatcccgctgctgttcgaatccggattgcaatcgtggatggacaaagttctcgtggtgtacgttgatgatgatgttcagttacgccgccttatggcacgtaacgggtttactgaagaagaagctctgatgcgcattcgttcacagtggcccagtgcggagaaagttaaacgtgcagacgctgtcatcgacaataatggcaatattgaagatacccgccgccagctgctggacattttacaccagtgggatctgctggacaaaggtggctccggccaccatcatcaccatcactaatga

SEQ ID NO: 4892 - protein, 211 aa, synthetic construct
  REGION 1..211: note = Variant of 3'O-kinase
MAVTIGLTGGIAAGKSTVSAMMRELGLPVIDADEAARAVMKPGEEAYRDIVAEFGPGILRADGEIDRGKLRAIRLSDEQQRKVLNSIVGPAVLKKMLAEWEAHIGSGAKTVVLDIPLLFESGLQSWMDKVLVVYVDDDVQLRRLMARNGFTEEEALMRIRSQWPSAEKVKRADAVIDNNGNIEDTRRQLLDILHQWDLLDKGGSGHHHHHH

SEQ ID NO: 4893 - DNA, 639 bp, synthetic construct
  misc_feature 1..639: note = Variant of 3'O-kinase
  source 1..639: mol_type = other DNA
atggcggttaccattggtttaacaggagggatcgcagcgggcaaaactactgtgagtgccatgatgcgtgaactgggtctgccggtcatcgatgctgacgaggcagcacgcgccgttatgaagccaggcgaagaagcgtatcgcgacattgtagctgaattcgggccgggcatccttcgtgcggatggcgagatcgatcgcgggaaactgcgtgctatccgcttttcggacgaacaacaacgtaaggtgctgaattcgattgtaggtcctgcagtcctgaagaagatgctcgcggagtgggaagctcatatcgggtcaggcgccaagacggttgtgctggatatcccgctgctgttcgaatccggattgcaatcgtggatggacaaagttctcgtggtgtacgttgatgatgatgttcagttacgccgccttatggcacgtaacgggtttactgaagaagaagctctgatgcgcattcgttcacagtggcccagtgcggagaaagttaaacgtgcagacgctgtcatcgacaataatggcaatattgaagatacccgccgccagctgctggacattttacaccagtgggatctgctggacaaaggtggctccggccaccatcatcaccatcactaatga

SEQ ID NO: 4894 - protein, 211 aa, synthetic construct
  REGION 1..211: note = Variant of 3'O-kinase
MAVTIGLTGGIAAGKTTVSAMMRELGLPVIDADEAARAVMKPGEEAYRDIVAEFGPGILRADGEIDRGKLRAIRFSDEQQRKVLNSIVGPAVLKKMLAEWEAHIGSGAKTVVLDIPLLFESGLQSWMDKVLVVYVDDDVQLRRLMARNGFTEEEALMRIRSQWPSAEKVKRADAVIDNNGNIEDTRRQLLDILHQWDLLDKGGSGHHHHHH

SEQ ID NO: 4895 - DNA, 639 bp, synthetic construct
  misc_feature 1..639: note = Variant of 3'O-kinase
  source 1..639: mol_type = other DNA
atggcggttaccattggtttaacaggagggatcgcagcgggcaaatcgactgtgagtgccatgatgcgtgaactgggtctgccggtcatcgatgctgacgaggcagcacgcgccgttatgaagccaggcgaagaagcgtatcgcgacattgtagctgaattcgggccgggcatccttcgtgcggatggcgagatcgatcgcgggaaactgcgtgctatccgcttttcggacgaacaacaacgtaaggtgctgaattcgattgtaggtcctgcagtcctgaagaagatgctcgcggagtgggaagctcatatcgggtcaggcgccaagacggttgtgctggatatcccgctgctgttcgaatccggattgcaatcgtggatggacaaagttctcgtggtgtacgttgatgatgatgttcagttacgccgccttatggcacgtaacgggtttccggaagaagaagctctgatgcgcattcgttcacagtggcccagtgcggagaaagttaaacgtgcagacgctgtcatcgacaataatggcaatattgaagatacccgccgccagctgctggacattttacaccagtgggatctgctggacaaaggtggctccggccaccatcatcaccatcactaatga

SEQ ID NO: 4896 - protein, 211 aa, synthetic construct
  REGION 1..211: note = Variant of 3'O-kinase
MAVTIGLTGGIAAGKSTVSAMMRELGLPVIDADEAARAVMKPGEEAYRDIVAEFGPGILRADGEIDRGKLRAIRFSDEQQRKVLNSIVGPAVLKKMLAEWEAHIGSGAKTVVLDIPLLFESGLQSWMDKVLVVYVDDDVQLRRLMARNGFPEEEALMRIRSQWPSAEKVKRADAVIDNNGNIEDTRRQLLDILHQWDLLDKGGSGHHHHHH

SEQ ID NO: 4897 - DNA, 639 bp, synthetic construct
  misc_feature 1..639: note = Variant of 3'O-kinase
  source 1..639: mol_type = other DNA
atggcggttaccattggtttaacaggagggatcgcagcgggcaaatcgactgtgagtgccatgatgcgtgaactgggtctgccggtcatcgatgctgacgaggcagcacgcgccgttatgaagccaggcgaagaagcgtatcgcgacattgtagctgaattcgggccgggcatccttcgtgcggatggcgagatcgatcgcgggaaactgcgtgctatccgcttttcggacgaacaacaacgtaaggtgctgaattcgattgtaggtcctgcagtcctgaagaagatgctcgcggagtgggaagctcatatcgggtcaggcgccaagacggttgtgctggatatcccgctgctgttcgaatccggattgcaatcgtggatggacaaagttctcgtggtgtacgttgatgatgatgttcagttacgccgccttatggcacgtaacgggtttactgaagaagaagctctgatgcgcattcgttcacagtggccccaggcggagaaagttaaacgtgcagacgctgtcatcgacaataatggcaatattgaagatacccgccgccagctgctggacattttacaccagtgggatctgctggacaaaggtggctccggccaccatcatcaccatcactaatga

SEQ ID NO: 4898 - protein, 211 aa, synthetic construct
  REGION 1..211: note = Variant of 3'O-kinase
MAVTIGLTGGIAAGKSTVSAMMRELGLPVIDADEAARAVMKPGEEAYRDIVAEFGPGILRADGEIDRGKLRAIRFSDEQQRKVLNSIVGPAVLKKMLAEWEAHIGSGAKTVVLDIPLLFESGLQSWMDKVLVVYVDDDVQLRRLMARNGFTEEEALMRIRSQWPQAEKVKRADAVIDNNGNIEDTRRQLLDILHQWDLLDKGGSGHHHHHH

SEQ ID NO: 4899 - DNA, 639 bp, synthetic construct
  misc_feature 1..639: note = Variant of 3'O-kinase
  source 1..639: mol_type = other DNA
atggcggttaccattggtttaacaggagggatcgcagcgggcaaatcgactgtgagtaggatgatgcgtgaactgggtctgccggtcatcgatgctgacgaggcagcacgcgccgttatgaagccaggcgaagaagcgtatcgcgacattgtagctgaattcgggccgggcatccttcgtgcggatggcgagatcgatcgcgggaaactgcgtgctatccgcttttcggacgaacaacaacgtaaggtgctgaattcgattgtaggtcctgcagtcctgaagaagatgctcgcggagtgggaagctcatatcgggtcaggcgccaagacggttgtgctggatatcccgctgctgttcgaatccggattgcaatcgtggatggacaaagttctcgtggtgtacgttgatgatgatgttcagttacgccgccttatggcacgtaacgggtttactgaagaagaagctctgatgcgcattcgttcacagtggcccagtgcggagaaagttaaacgtgcagacgctgtcatcgacaataatggcaatattgaagatacccgccgccagctgctggacattttacaccagtgggatctgctggacaaaggtggctccggccaccatcatcaccatcactaatga

SEQ ID NO: 4900 - protein, 211 aa, synthetic construct
  REGION 1..211: note = Variant of 3'O-kinase
MAVTIGLTGGIAAGKSTVSRMMRELGLPVIDADEAARAVMKPGEEAYRDIVAEFGPGILRADGEIDRGKLRAIRFSDEQQRKVLNSIVGPAVLKKMLAEWEAHIGSGAKTVVLDIPLLFESGLQSWMDKVLVVYVDDDVQLRRLMARNGFTEEEALMRIRSQWPSAEKVKRADAVIDNNGNIEDTRRQLLDILHQWDLLDKGGSGHHHHHH

SEQ ID NO: 4901 - DNA, 639 bp, synthetic construct
  misc_feature 1..639: note = Variant of 3'O-kinase
  source 1..639: mol_type = other DNA
atggcggttaccattggtttaacaggagggatcgcagcgggcaaatcgactgtgagtgccatgatgcgtgaactgggtctgccggtcatcgatgctgacgaggcagcacgcgccgttatgaagccaggcgaagaagcgtatcgcgacattgtagctgaattcgggccgggcatccttcgtgcggatggcgagatcgatcgcgggaaactgcgtgctatccgcttttcggacgaacaacaacgtaaggtgctgaattcgattgtaggtcctgcagtcgtgaagaagatgctcgcggagtgggaagctcatatcgggtcaggcgccaagacggttgtgctggatatcccgctgctgttcgaatccggattgcaatcgtggatggacaaagttctcgtggtgtacgttgatgatgatgttcagttacgccgccttatggcacgtaacgggtttactgaagaagaagctctgatgcgcattcgttcacagtggcccagtgcggagaaagttaaacgtgcagacgctgtcatcgacaataatggcaatattgaagatacccgccgccagctgctggacattttacaccagtgggatctgctggacaaaggtggctccggccaccatcatcaccatcactaatga

SEQ ID NO: 4902 - protein, 211 aa, synthetic construct
  REGION 1..211: note = Variant of 3'O-kinase
MAVTIGLTGGIAAGKSTVSAMMRELGLPVIDADEAARAVMKPGEEAYRDIVAEFGPGILRADGEIDRGKLRAIRFSDEQQRKVLNSIVGPAVVKKMLAEWEAHIGSGAKTVVLDIPLLFESGLQSWMDKVLVVYVDDDVQLRRLMARNGFTEEEALMRIRSQWPSAEKVKRADAVIDNNGNIEDTRRQLLDILHQWDLLDKGGSGHHHHHH

SEQ ID NO: 4903 - DNA, 639 bp, synthetic construct
  misc_feature 1..639: note = Variant of 3'O-kinase
  source 1..639: mol_type = other DNA
atggcggttaccattggtttaacaggagggatcgcagcgggcaaatcgactgtgagtgccatgatgcgtgaactgggtctgccggtcatcgatgctgacgaggcagcacgcgccgttatgaagccaggcgaagaagcgtatcgcgacattgtagctgaattcgggccgggcatccttcgtgcggatggcgagatcgatcgcgggaaactgcgtgctatccgcttttcggacgaacaacaacgtaaggtgctgaattcgattgtaggtcctgcagtcctgaagaagatgctcgcggagtgggaagctcatatcgggtcaggcgccaagacggttgtgctggatatcccgctgctgttcgaatccgagttgcaatcgtggatggacaaagttctcgtggtgtacgttgatgatgatgttcagttacgccgccttatggcacgtaacgggtttactgaagaagaagctctgatgcgcattcgttcacagtggcccagtgcggagaaagttaaacgtgcagacgctgtcatcgacaataatggcaatattgaagatacccgccgccagctgctggacattttacaccagtgggatctgctggacaaaggtggctccggccaccatcatcaccatcactaatga

SEQ ID NO: 4904 - protein, 211 aa, synthetic construct
  REGION 1..211: note = Variant of 3'O-kinase
MAVTIGLTGGIAAGKSTVSAMMRELGLPVIDADEAARAVMKPGEEAYRDIVAEFGPGILRADGEIDRGKLRAIRFSDEQQRKVLNSIVGPAVLKKMLAEWEAHIGSGAKTVVLDIPLLFESELQSWMDKVLVVYVDDDVQLRRLMARNGFTEEEALMRIRSQWPSAEKVKRADAVIDNNGNIEDTRRQLLDILHQWDLLDKGGSGHHHHHH

SEQ ID NO: 4905 - DNA, 639 bp, synthetic construct
  misc_feature 1..639: note = Variant of 3'O-kinase
  source 1..639: mol_type = other DNA
atggcggttaccattggtttaacaggagggatcgcagcgggcaaatcgactgtgagtgccatgatgcgtgaactgggtctgccggtcatcgatgctgacgaggcagcacgcgccgttatgaagccaggcgaagaagcgtatcgcgacattgtagctgaattcgggccgggcatccttcgtgcggatggcgagatcgatcgcgggaaactgcgtgctatccgcttttcggacgaacaacaacgtaaggtgctgaattcgattgtaggtcctgcagtcctgaagaagatgctcgcggagtgggaagctcatatcgggtcaggcgccaagacggttgtgctggatatcccgctgctgttcgaatccggattgcaatcgtggatggacaaagttctcgtggtgtacgttgatgatgatgttcagttacgccgccttatggcacgtaacgggtttactgaagaagaagctctgatgcgcattcgttcacagtggcccagtgcggagaaagttaaacgtgcagacgctgtcatcgacaataatggcaatcgggaagatacccgccgccagctgctggacattttacaccagtgggatctgctggacaaaggtggctccggccaccatcatcaccatcactaatga

SEQ ID NO: 4906 - protein, 211 aa, synthetic construct
  REGION 1..211: note = Variant of 3'O-kinase
MAVTIGLTGGIAAGKSTVSAMMRELGLPVIDADEAARAVMKPGEEAYRDIVAEFGPGILRADGEIDRGKLRAIRFSDEQQRKVLNSIVGPAVLKKMLAEWEAHIGSGAKTVVLDIPLLFESGLQSWMDKVLVVYVDDDVQLRRLMARNGFTEEEALMRIRSQWPSAEKVKRADAVIDNNGNREDTRRQLLDILHQWDLLDKGGSGHHHHHH

SEQ ID NO: 4907 - DNA, 639 bp, synthetic construct
  misc_feature 1..639: note = Variant of 3'O-kinase
  source 1..639: mol_type = other DNA
atggcggttaccattggtttaacaggagggatcgcagcgggcaaatcgactgtgagtgccatgatgcgtgaactgggtctgccggtcatcgatgctgacgaggcagcacgcgccgttatgaagccaggcgaagaagcgtatcgcgacattgtagctgaattcgggccgggcatccttcgtgcggatggcgagatcgatcgcgggaaactgcgtgctatccgcttttcggacgaacaacaacgtaaggtgctgaattcgattgtaggtcctgcagtcctgaagaagatgctcgcggagtgggaagctcatatcgggtcaggcgccaagacggttgtgctggatatcccgctgctgttcgaatccggattgcaatcgtggatggacaaagttctcgtggtgtacgttgatgatgatacgcagttacgccgccttatggcacgtaacgggtttactgaagaagaagctctgatgcgcattcgttcacagtggcccagtgcggagaaagttaaacgtgcagacgctgtcatcgacaataatggcaatattgaagatacccgccgccagctgctggacattttacaccagtgggatctgctggacaaaggtggctccggccaccatcatcaccatcactaatga

SEQ ID NO: 4908 - protein, 211 aa, synthetic construct
  REGION 1..211: note = Variant of 3'O-kinase
MAVTIGLTGGIAAGKSTVSAMMRELGLPVIDADEAARAVMKPGEEAYRDIVAEFGPGILRADGEIDRGKLRAIRFSDEQQRKVLNSIVGPAVLKKMLAEWEAHIGSGAKTVVLDIPLLFESGLQSWMDKVLVVYVDDDTQLRRLMARNGFTEEEALMRIRSQWPSAEKVKRADAVIDNNGNIEDTRRQLLDILHQWDLLDKGGSGHHHHHH

SEQ ID NO: 4909 - DNA, 639 bp, synthetic construct
  misc_feature 1..639: note = Variant of 3'O-kinase
  source 1..639: mol_type = other DNA
atggcggttaccattggtttaacaggagggatcgcagcgggcaaatcgactgtgagtcatatgatgcgtgaactgggtctgccggtcatcgatgctgacgaggcagcacgcgccgttatgaagccaggcgaagaagcgtatcgcgacattgtagctgaattcgggccgggcatccttcgtgcggatggcgagatcgatcgcgggaaactgcgtgctatccgcttttcggacgaacaacaacgtaaggtgctgaattcgattgtaggtcctgcagtcctgaagaagatgctcgcggagtgggaagctcatatcgggtcaggcgccaagacggttgtgctggatatcccgctgctgttcgaatccggattgcaatcgtggatggacaaagttctcgtggtgtacgttgatgatgatgttcagttacgccgccttatggcacgtaacgggtttactgaagaagaagctctgatgcgcattcgttcacagtggcccagtgcggagaaagttaaacgtgcagacgctgtcatcgacaataatggcaatattgaagatacccgccgccagctgctggacattttacaccagtgggatctgctggacaaaggtggctccggccaccatcatcaccatcactaatga

SEQ ID NO: 4910 - protein, 211 aa, synthetic construct
  REGION 1..211: note = Variant of 3'O-kinase
MAVTIGLTGGIAAGKSTVSHMMRELGLPVIDADEAARAVMKPGEEAYRDIVAEFGPGILRADGEIDRGKLRAIRFSDEQQRKVLNSIVGPAVLKKMLAEWEAHIGSGAKTVVLDIPLLFESGLQSWMDKVLVVYVDDDVQLRRLMARNGFTEEEALMRIRSQWPSAEKVKRADAVIDNNGNIEDTRRQLLDILHQWDLLDKGGSGHHHHHH

SEQ ID NO: 4911 - DNA, 639 bp, synthetic construct
  misc_feature 1..639: note = Variant of 3'O-kinase
  source 1..639: mol_type = other DNA
atggcggttaccattggtttaacaggagggatcgcagcgggcaaatcgactgtgagtgccatgatgcgtgaactgggtctgccggtcatcgatgctgacgaggcagcacgcgccgttatgaagccaggcgaagaagcgtatcgcgacattgtagctgaattcgggccgggcatccttcgtgcggatggcgagatcgatcgcgggaaactgcgtgctatccgcttttcggacgaacaacaacgtaaggtgctgacttcgattgtaggtcctgcagtcctgaagaagatgctcgcggagtgggaagctcatatcgggtcaggcgccaagacggttgtgctggatatcccgctgctgttcgaatccggattgcaatcgtggatggacaaagttctcgtggtgtacgttgatgatgatgttcagttacgccgccttatggcacgtaacgggtttactgaagaagaagctctgatgcgcattcgttcacagtggcccagtgcggagaaagttaaacgtgcagacgctgtcatcgacaataatggcaatattgaagatacccgccgccagctgctggacattttacaccagtgggatctgctggacaaaggtggctccggccaccatcatcaccatcactaatga

SEQ ID NO: 4912 - protein, 211 aa, synthetic construct
  REGION 1..211: note = Variant of 3'O-kinase
MAVTIGLTGGIAAGKSTVSAMMRELGLPVIDADEAARAVMKPGEEAYRDIVAEFGPGILRADGEIDRGKLRAIRFSDEQQRKVLTSIVGPAVLKKMLAEWEAHIGSGAKTVVLDIPLLFESGLQSWMDKVLVVYVDDDVQLRRLMARNGFTEEEALMRIRSQWPSAEKVKRADAVIDNNGNIEDTRRQLLDILHQWDLLDKGGSGHHHHHH

SEQ ID NO: 4913 - DNA, 639 bp, synthetic construct
  misc_feature 1..639: note = Variant of 3'O-kinase
  source 1..639: mol_type = other DNA
atggcggttaccattggtttaacaggagggatcgcagcgggcaaatcgactgtgagtgccatgatgcgtgaactgggtctgccggtcatcgatgctgacgaggcagcacgcgccgttatgaagccaggcgaagaagcgtatcgcgacattgtagctgaattcgggccgggcatccttcgtgcggatggcgagatcgatcgcgggaaactgcgtgctatccgcttttcggacgaacaacaacgtaaggtgctgaattcgattttgggtcctgcagtcctgaagaagatgctcgcggagtgggaagctcatatcgggtcaggcgccaagacggttgtgctggatatcccgctgctgttcgaatccggattgcaatcgtggatggacaaagttctcgtggtgtacgttgatgatgatgttcagttacgccgccttatggcacgtaacgggtttactgaagaagaagctctgatgcgcattcgttcacagtggcccagtgcggagaaagttaaacgtgcagacgctgtcatcgacaataatggcaatattgaagatacccgccgccagctgctggacattttacaccagtgggatctgctggacaaaggtggctccggccaccatcatcaccatcactaatga

SEQ ID NO: 4914 - protein, 211 aa, synthetic construct
  REGION 1..211: note = Variant of 3'O-kinase
MAVTIGLTGGIAAGKSTVSAMMRELGLPVIDADEAARAVMKPGEEAYRDIVAEFGPGILRADGEIDRGKLRAIRFSDEQQRKVLNSILGPAVLKKMLAEWEAHIGSGAKTVVLDIPLLFESGLQSWMDKVLVVYVDDDVQLRRLMARNGFTEEEALMRIRSQWPSAEKVKRADAVIDNNGNIEDTRRQLLDILHQWDLLDKGGSGHHHHHH

SEQ ID NO: 4915 - DNA, 639 bp, synthetic construct
  misc_feature 1..639: note = Variant of 3'O-kinase
  source 1..639: mol_type = other DNA
atggcggttaccattggtttaacaggagggatcgcagcgggcaaatcgactgtgagtgccatgatgcgtgaactgggtctgccggtcatcgatgctgacgaggcagcacgcgccgttatgaagccaggcgaagaagcgtatcgcgacattgtagctgaattcgggccgggcatccttcgtgcggatggcgagatcgatcgcgggaaactgcgtgctatccgcttttcggacgaacaacaacgtaaggtgctgaattcgattgtacttcctgcagtcctgaagaagatgctcgcggagtgggaagctcatatcgggtcaggcgccaagacggttgtgctggatatcccgctgctgttcgaatccggattgcaatcgtggatggacaaagttctcgtggtgtacgttgatgatgatgttcagttacgccgccttatggcacgtaacgggtttactgaagaagaagctctgatgcgcattcgttcacagtggcccagtgcggagaaagttaaacgtgcagacgctgtcatcgacaataatggcaatattgaagatacccgccgccagctgctggacattttacaccagtgggatctgctggacaaaggtggctccggccaccatcatcaccatcactaatga

SEQ ID NO: 4916 - protein, 211 aa, synthetic construct
  REGION 1..211: note = Variant of 3'O-kinase
MAVTIGLTGGIAAGKSTVSAMMRELGLPVIDADEAARAVMKPGEEAYRDIVAEFGPGILRADGEIDRGKLRAIRFSDEQQRKVLNSIVLPAVLKKMLAEWEAHIGSGAKTVVLDIPLLFESGLQSWMDKVLVVYVDDDVQLRRLMARNGFTEEEALMRIRSQWPSAEKVKRADAVIDNNGNIEDTRRQLLDILHQWDLLDKGGSGHHHHHH

SEQ ID NO: 4917 - DNA, 639 bp, synthetic construct
  misc_feature 1..639: note = Variant of 3'O-kinase
  source 1..639: mol_type = other DNA
atggcggttaccattggtttaacaggagggatcgcagcgggcaaatcgactgtgagtgccatgatgcgtgaactgggtctgccggtcatcgatgctgacgaggcagcacgcgccgttatgaagccaggcgaagaagcgtatcgcgacattgtagctgaattcgggccgggcatccttcgtgcggatggcgagatcgatcgcgggaaactgcgtgctatccgcttttcggacgaacaacaacgtaaggtgctgaattcgattgtaggtcctgcagtcctgaagaagatgctcgcggagtgggaagctcatatcgggtcaggcgccaagacggttgtgctggatatcccgctgctgttcgaatccggattgcaatcgtggatggacaaagttctcgtggtgtgggttgatgatgatgttcagttacgccgccttatggcacgtaacgggtttactgaagaagaagctctgatgcgcattcgttcacagtggcccagtgcggagaaagttaaacgtgcagacgctgtcatcgacaataatggcaatattgaagatacccgccgccagctgctggacattttacaccagtgggatctgctggacaaaggtggctccggccaccatcatcaccatcactaatga

SEQ ID NO: 4918 - protein, 211 aa, synthetic construct
  REGION 1..211: note = Variant of 3'O-kinase
MAVTIGLTGGIAAGKSTVSAMMRELGLPVIDADEAARAVMKPGEEAYRDIVAEFGPGILRADGEIDRGKLRAIRFSDEQQRKVLNSIVGPAVLKKMLAEWEAHIGSGAKTVVLDIPLLFESGLQSWMDKVLVVWVDDDVQLRRLMARNGFTEEEALMRIRSQWPSAEKVKRADAVIDNNGNIEDTRRQLLDILHQWDLLDKGGSGHHHHHH

SEQ ID NO: 4919 - DNA, 639 bp, synthetic construct
  misc_feature 1..639: note = Variant of 3'O-kinase
  source 1..639: mol_type = other DNA
atggcggttaccattggtttaacaggagggatcgcagcgggcaaatcgactgtgagtgccatgatgcgtgaactgggtctgccggtcatcgatgctgacgagcttgcacgcgccgttatgaagccaggcgaagaagcgtatcgcgacattgtagctgaattcgggccgggcatccttcgtgcggatggcgagatcgatcgcgggaaactgcgtgctatccgcttttcggacgaacaacaacgtaaggtgctgaattcgattgtaggtcctgcagtcctgaagaagatgctcgcggagtgggaagctcatatcgggtcaggcgccaagacggttgtgctggatatcccgctgctgttcgaatccggattgcaatcgtggatggacaaagttctcgtggtgtacgttgatgatgatgttcagttacgccgccttatggcacgtaacgggtttactgaagaagaagctctgatgcgcattcgttcacagtggcccagtgcggagaaagttaaacgtgcagacgctgtcatcgacaataatggcaatattgaagatacccgccgccagctgctggacattttacaccagtgggatctgctggacaaaggtggctccggccaccatcatcaccatcactaatga

SEQ ID NO: 4920 - protein, 211 aa, synthetic construct
  REGION 1..211: note = Variant of 3'O-kinase
MAVTIGLTGGIAAGKSTVSAMMRELGLPVIDADELARAVMKPGEEAYRDIVAEFGPGILRADGEIDRGKLRAIRFSDEQQRKVLNSIVGPAVLKKMLAEWEAHIGSGAKTVVLDIPLLFESGLQSWMDKVLVVYVDDDVQLRRLMARNGFTEEEALMRIRSQWPSAEKVKRADAVIDNNGNIEDTRRQLLDILHQWDLLDKGGSGHHHHHH

SEQ ID NO: 4921 - DNA, 639 bp, synthetic construct
  misc_feature 1..639: note = Variant of 3'O-kinase
  source 1..639: mol_type = other DNA
atggcggttaccattggtttaacaggagggatcgcagcgggcaaatcgactgtgagtgccatgatgcgtgaactgggtctgccggtcatcgatgctgacgaggcagcacgcgccgttatgaagccaggcgaagaagcgtatcgcgacattgtagctgaattcgggccgggcatccttcgtgcggatggcgagatcgatcgcgggaaactgcgtgctatccgcttttcggacgaacaacaacgtaaggtgctgaattcgattgtaggtcctgcagtcctgaagaagatgctcgcggagtgggaagctcatatcgggtcaggcgccaagacggttgtgctggatatcccgctgctgttcgaatccggattgcaatcgtggatggacaaagttctcgtggtgtacgttgatgatgatgttcagttacgccgccttatgtcgcgtaacgggtttactgaagaagaagctctgatgcgcattcgttcacagtggcccagtgcggagaaagttaaacgtgcagacgctgtcatcgacaataatggcaatattgaagatacccgccgccagctgctggacattttacaccagtgggatctgctggacaaaggtggctccggccaccatcatcaccatcactaatga

SEQ ID NO: 4922 - protein, 211 aa, synthetic construct
  REGION 1..211: note = Variant of 3'O-kinase
MAVTIGLTGGIAAGKSTVSAMMRELGLPVIDADEAARAVMKPGEEAYRDIVAEFGPGILRADGEIDRGKLRAIRFSDEQQRKVLNSIVGPAVLKKMLAEWEAHIGSGAKTVVLDIPLLFESGLQSWMDKVLVVYVDDDVQLRRLMSRNGFTEEEALMRIRSQWPSAEKVKRADAVIDNNGNIEDTRRQLLDILHQWDLLDKGGSGHHHHHH

SEQ ID NO: 4923 - DNA, 639 bp, synthetic construct
  misc_feature 1..639: note = Variant of 3'O-kinase
  source 1..639: mol_type = other DNA
atggcggttaccattggtttaacaggagggatcgcagcgggcaaatcgactgtgagtgccatgatgcgtgaactgggtctgccggtcatcgatgctgacgaggcagcacgcgccgttatgaagccaggcgaagaagcgtatcgcgacattgtagctgaattcgggccgggcatccttcgtgcggatggcgagatcgatcgcgggaaactgcgtgctatccgcttttcggacgaacaacaacgtaaggtgctgctttcgattgtaggtcctgcagtcctgaagaagatgctcgcggagtgggaagctcatatcgggtcaggcgccaagacggttgtgctggatatcccgctgctgttcgaatccggattgcaatcgtggatggacaaagttctcgtggtgtacgttgatgatgatgttcagttacgccgccttatggcacgtaacgggtttactgaagaagaagctctgatgcgcattcgttcacagtggcccagtgcggagaaagttaaacgtgcagacgctgtcatcgacaataatggcaatattgaagatacccgccgccagctgctggacattttacaccagtgggatctgctggacaaaggtggctccggccaccatcatcaccatcactaatga

SEQ ID NO: 4924 - protein, 211 aa, synthetic construct
  REGION 1..211: note = Variant of 3'O-kinase
MAVTIGLTGGIAAGKSTVSAMMRELGLPVIDADEAARAVMKPGEEAYRDIVAEFGPGILRADGEIDRGKLRAIRFSDEQQRKVLLSIVGPAVLKKMLAEWEAHIGSGAKTVVLDIPLLFESGLQSWMDKVLVVYVDDDVQLRRLMARNGFTEEEALMRIRSQWPSAEKVKRADAVIDNNGNIEDTRRQLLDILHQWDLLDKGGSGHHHHHH

SEQ ID NO: 4925 - DNA, 639 bp, synthetic construct
  misc_feature 1..639: note = Variant of 3'O-kinase
  source 1..639: mol_type = other DNA
atggcggttaccattggtttaacaggagggatcgcagcgggcaaatcgactgtgagtgccatgatgcgtgaactgggtctgccggtcatcgatgctgacgaggcagcacgcgccgttatgaagccaggcgaagaagcgtatcgcgacattgtagctgaattcgggccgggcatccttcgtgcggatggcgagatcgatcgcgggaaactgcgtgctatccgcttttcggacgaacaacaacgtaaggtgctgaattcgattgtaggtcctgcagtcctgaagaagatgctcgcggagtgggaagctcatatcgggtcaggcgccaagacggttgtgctggatatcccgctgctgttcgaatccggattgcaatcgtggatggacaaagttctcgtggtgtacgttgatgatgatgttcagttacgccgccttatggcacgtaacgggtttactgaagaagaagctctgatgcgcattcgtctgcagtggcccagtgcggagaaagttaaacgtgcagacgctgtcatcgacaataatggcaatattgaagatacccgccgccagctgctggacattttacaccagtgggatctgctggacaaaggtggctccggccaccatcatcaccatcactaatga

SEQ ID NO: 4926 - protein, 211 aa, synthetic construct
  REGION 1..211: note = Variant of 3'O-kinase
MAVTIGLTGGIAAGKSTVSAMMRELGLPVIDADEAARAVMKPGEEAYRDIVAEFGPGILRADGEIDRGKLRAIRFSDEQQRKVLNSIVGPAVLKKMLAEWEAHIGSGAKTVVLDIPLLFESGLQSWMDKVLVVYVDDDVQLRRLMARNGFTEEEALMRIRLQWPSAEKVKRADAVIDNNGNIEDTRRQLLDILHQWDLLDKGGSGHHHHHH

SEQ ID NO: 4927 - DNA, 639 bp, synthetic construct
  misc_feature 1..639: note = Variant of 3'O-kinase
  source 1..639: mol_type = other DNA
atggcggttaccattggtttaacaggagggatcgcagcgggcaaatcgactgtgagtgccatgatgcgtgaactgggtctgccggtcatcgatgctgacgaggcagcacgcgccgttatgaagccaggcgaagaagcgtatcgcgacattgtagctgaattcgggccgggcatccttcgtgcggatggcgagatcgatcgcgggaaactgcgtgctatccgcttttcggacgaacaacaacgtaaggtgctgaattcgattgtaggtcctgcagtcctgaagaagatgctcgcggagtgggaagctcatatcgggtcaggcgccaagacggttgtgctggatatcccgctgctgttcgaatccggattgcaatcgtgggtggacaaagttctcgtggtgtacgttgatgatgatgttcagttacgccgccttatggcacgtaacgggtttactgaagaagaagctctgatgcgcattcgttcacagtggcccagtgcggagaaagttaaacgtgcagacgctgtcatcgacaataatggcaatattgaagatacccgccgccagctgctggacattttacaccagtgggatctgctggacaaaggtggctccggccaccatcatcaccatcactaatga

SEQ ID NO: 4928 - protein, 211 aa, synthetic construct
  REGION 1..211: note = Variant of 3'O-kinase
MAVTIGLTGGIAAGKSTVSAMMRELGLPVIDADEAARAVMKPGEEAYRDIVAEFGPGILRADGEIDRGKLRAIRFSDEQQRKVLNSIVGPAVLKKMLAEWEAHIGSGAKTVVLDIPLLFESGLQSWVDKVLVVYVDDDVQLRRLMARNGFTEEEALMRIRSQWPSAEKVKRADAVIDNNGNIEDTRRQLLDILHQWDLLDKGGSGHHHHHH

SEQ ID NO: 4929 - DNA, 639 bp, synthetic construct
  misc_feature 1..639: note = Variant of 3'O-kinase
  source 1..639: mol_type = other DNA
atggcggttaccattggtttaacaggagggatcgcagcgggcaaatcgactgtgagtgccatgatgcgtgaactgggtctgccggtcatcgatgctgacgaggcagcacgcgccgttatgaagccaggcgaagaagcgtatcgcgacattgtagctgaattcgggccgggcatccttcgtgcggatggcgagatcgatcgcgggaaactgcgtgctatccgcttttcggacgaacaacaacgtaaggtgctgaattcgattgtaggtcctgcagtcctgaagaagatgctcgcggagtgggaagctcatatcgggtcaggcgccaagacggttgtgctggatatcccgctgctgttcgaagggggattgcaatcgtggatggacaaagttctcgtggtgtacgttgatgatgatgttcagttacgccgccttatggcacgtaacgggtttactgaagaagaagctctgatgcgcattcgttcacagtggcccagtgcggagaaagttaaacgtgcagacgctgtcatcgacaataatggcaatattgaagatacccgccgccagctgctggacattttacaccagtgggatctgctggacaaaggtggctccggccaccatcatcaccatcactaatga

SEQ ID NO: 4930 - protein, 211 aa, synthetic construct
  REGION 1..211: note = Variant of 3'O-kinase
MAVTIGLTGGIAAGKSTVSAMMRELGLPVIDADEAARAVMKPGEEAYRDIVAEFGPGILRADGEIDRGKLRAIRFSDEQQRKVLNSIVGPAVLKKMLAEWEAHIGSGAKTVVLDIPLLFEGGLQSWMDKVLVVYVDDDVQLRRLMARNGFTEEEALMRIRSQWPSAEKVKRADAVIDNNGNIEDTRRQLLDILHQWDLLDKGGSGHHHHHH

SEQ ID NO: 4931 - DNA, 639 bp, synthetic construct
  misc_feature 1..639: note = Variant of 3'O-kinase
  source 1..639: mol_type = other DNA
atggcggttaccattggtttaacaggagggatcgcagcgggcaaatcgactgtgagtgggatgatgcgtgaactgggtctgccggtcatcgatgctgacgaggcagcacgcgccgttatgaagccaggcgaagaagcgtatcgcgacattgtagctgaattcgggccgggcatccttcgtgcggatggcgagatcgatcgcgggaaactgcgtgctatccgcttttcggacgaacaacaacgtaaggtgctgaattcgattgtaggtcctgcagtcctgaagaagatgctcgcggagtgggaagctcatatcgggtcaggcgccaagacggttgtgctggatatcccgctgctgttcgaatccggattgcaatcgtggatggacaaagttctcgtggtgtacgttgatgatgatgttcagttacgccgccttatggcacgtaacgggtttactgaagaagaagctctgatgcgcattcgttcacagtggcccagtgcggagaaagttaaacgtgcagacgctgtcatcgacaataatggcaatattgaagatacccgccgccagctgctggacattttacaccagtgggatctgctggacaaaggtggctccggccaccatcatcaccatcactaatga

SEQ ID NO: 4932 - protein, 211 aa, synthetic construct
  REGION 1..211: note = Variant of 3'O-kinase
MAVTIGLTGGIAAGKSTVSGMMRELGLPVIDADEAARAVMKPGEEAYRDIVAEFGPGILRADGEIDRGKLRAIRFSDEQQRKVLNSIVGPAVLKKMLAEWEAHIGSGAKTVVLDIPLLFESGLQSWMDKVLVVYVDDDVQLRRLMARNGFTEEEALMRIRSQWPSAEKVKRADAVIDNNGNIEDTRRQLLDILHQWDLLDKGGSGHHHHHH

SEQ ID NO: 4933 - DNA, 639 bp, synthetic construct
  misc_feature 1..639: note = Variant of 3'O-kinase
  source 1..639: mol_type = other DNA
atggcggttaccattggtttaacaggagggatcgcagcgggcaaatcgactgtgagtgccatgcttcgtgaactgggtctgccggtcatcgatgctgacgaggcagcacgcgccgttatgaagccaggcgaagaagcgtatcgcgacattgtagctgaattcgggccgggcatccttcgtgcggatggcgagatcgatcgcgggaaactgcgtgctatccgcttttcggacgaacaacaacgtaaggtgctgaattcgattgtaggtcctgcagtcctgaagaagatgctcgcggagtgggaagctcatatcgggtcaggcgccaagacggttgtgctggatatcccgctgctgttcgaatccggattgcaatcgtggatggacaaagttctcgtggtgtacgttgatgatgatgttcagttacgccgccttatggcacgtaacgggtttactgaagaagaagctctgatgcgcattcgttcacagtggcccagtgcggagaaagttaaacgtgcagacgctgtcatcgacaataatggcaatattgaagatacccgccgccagctgctggacattttacaccagtgggatctgctggacaaaggtggctccggccaccatcatcaccatcactaatga

SEQ ID NO: 4934 - protein, 211 aa, synthetic construct
  REGION 1..211: note = Variant of 3'O-kinase
MAVTIGLTGGIAAGKSTVSAMLRELGLPVIDADEAARAVMKPGEEAYRDIVAEFGPGILRADGEIDRGKLRAIRFSDEQQRKVLNSIVGPAVLKKMLAEWEAHIGSGAKTVVLDIPLLFESGLQSWMDKVLVVYVDDDVQLRRLMARNGFTEEEALMRIRSQWPSAEKVKRADAVIDNNGNIEDTRRQLLDILHQWDLLDKGGSGHHHHHH

SEQ ID NO: 4935 - DNA, 639 bp, synthetic construct
  misc_feature 1..639: note = Variant of 3'O-kinase
  source 1..639: mol_type = other DNA
atggcggttaccattggtttaacaggagggatcgcagcgggcaaatcgactgtgagtgccatgatgcgtgaactgggtctgccggtcatcgatgctgacgaggcagcacgcgccgttatgaagccaggcgaagaagcgtatcgcgacattgtagctgaattcgggccgggcatccttcgtgcggatggcgagatcgatcgcgggaaactgcgtgctatccgcttttcggacgaacaacaacgtaaggtgctgaattcgattgtaggtcctgcagtcctgaagaagatgctcgcggagtgggaagctcatatcgggtcaggcgccaagacggttgtgctggatatcccgctgctgttcgaatccggattgcaatcgtggatggacaaagttctcgtggtgtacgttgatgatgatgttcagttacgccgccttatggcacgtaacgggtttactgaagaagaagctctgatgcgcattcattcacagtggcccagtgcggagaaagttaaacgtgcagacgctgtcatcgacaataatggcaatattgaagatacccgccgccagctgctggacattttacaccagtgggatctgctggacaaaggtggctccggccaccatcatcaccatcactaatga

SEQ ID NO: 4936 - protein, 211 aa, synthetic construct
  REGION 1..211: note = Variant of 3'O-kinase
MAVTIGLTGGIAAGKSTVSAMMRELGLPVIDADEAARAVMKPGEEAYRDIVAEFGPGILRADGEIDRGKLRAIRFSDEQQRKVLNSIVGPAVLKKMLAEWEAHIGSGAKTVVLDIPLLFESGLQSWMDKVLVVYVDDDVQLRRLMARNGFTEEEALMRIHSQWPSAEKVKRADAVIDNNGNIEDTRRQLLDILHQWDLLDKGGSGHHHHHH

SEQ ID NO: 4937 - DNA, 639 bp, synthetic construct
  misc_feature 1..639: note = Variant of 3'O-kinase
  source 1..639: mol_type = other DNA
atggcggttaccattggtttaacaggagggatcgcagcgggcaaatcgactgtgagtgccatgatgcgtgaactgggtctgccggtcatcgatgctgacgaggcagcacgcgccgttatgaagccaggcgaagaagcgtatcgcgacattgtagctgaattcgggccgggcatccttcgtgcggatggcgagatcgatcgcgggaaactgcgtgctatccgcttttcggacgaacaacaacgtaaggtgctgaattcgattgtaggtcctgcagtcctgaagaagatgctcgcggagtgggaagctcatatcgggtcaggcgccaagacggttgtgctggatatcccgctgctgttcgaatccggattgcaatcgtggatggacaaagttctcgtggtgtacgttgatgatgatgttcagttacgccgccttatggcacgtaacgggtttactgaagaagaagctctgatgcgcattcgttcacagtggcccagtgcggagaaagttaaacgtgcagacgctgtcttggacaataatggcaatattgaagatacccgccgccagctgctggacattttacaccagtgggatctgctggacaaaggtggctccggccaccatcatcaccatcactaatga

SEQ ID NO: 4938 - protein, 211 aa, synthetic construct
  REGION 1..211: note = Variant of 3'O-kinase
MAVTIGLTGGIAAGKSTVSAMMRELGLPVIDADEAARAVMKPGEEAYRDIVAEFGPGILRADGEIDRGKLRAIRFSDEQQRKVLNSIVGPAVLKKMLAEWEAHIGSGAKTVVLDIPLLFESGLQSWMDKVLVVYVDDDVQLRRLMARNGFTEEEALMRIRSQWPSAEKVKRADAVLDNNGNIEDTRRQLLDILHQWDLLDKGGSGHHHHHH

SEQ ID NO: 4939 - DNA, 639 bp, synthetic construct
  misc_feature 1..639: note = Variant of 3'O-kinase
  source 1..639: mol_type = other DNA
atggcggttaccattggtttaacaggagggatcgcagcgggcaaatcgactgtgagtgccatgatgcgtgaactgggtctgccggtcatcgatgctgacgaggcagcacgcgccgttatgaagccaggcgaagaagcgtatcgcgacattgtagctgaattcgggccgggcatccttcgtgcggatggcgagatcgatcgcgggaaactgcgtgctatccgcttttcggacgaacaacaacgtaaggtgctgaattcgattgtaggtcctgcagtcctgaagaagatgctcgcggagtgggaagctcatatcgggtcaggcgccaagacggttgtgctggatatcccgctgctgttcgaatccggattgcaatcgtggatggacaaagttctcgtggtgtacgttgatgatgatgttcagttacgccgccttatggatcgtaacgggtttactgaagaagaagctctgatgcgcattcgttcacagtggcccagtgcggagaaagttaaacgtgcagacgctgtcatcgacaataatggcaatattgaagatacccgccgccagctgctggacattttacaccagtgggatctgctggacaaaggtggctccggccaccatcatcaccatcactaatga

SEQ ID NO: 4940 - protein, 211 aa, synthetic construct
  REGION 1..211: note = Variant of 3'O-kinase
MAVTIGLTGGIAAGKSTVSAMMRELGLPVIDADEAARAVMKPGEEAYRDIVAEFGPGILRADGEIDRGKLRAIRFSDEQQRKVLNSIVGPAVLKKMLAEWEAHIGSGAKTVVLDIPLLFESGLQSWMDKVLVVYVDDDVQLRRLMDRNGFTEEEALMRIRSQWPSAEKVKRADAVIDNNGNIEDTRRQLLDILHQWDLLDKGGSGHHHHHH

SEQ ID NO: 4941 - DNA, 639 bp, synthetic construct
  misc_feature 1..639: note = Variant of 3'O-kinase
  source 1..639: mol_type = other DNA
atggcggttaccattggtttaacaggagggatcgcagcgggcaaatcgactgtgagtgccatgatgcgtgaactgggtctgccggtcatcgatgctgacgaggcagcacgcgccgttatgaagccaggcgaagaagcgtatcgcgacattgtagctgaattcgggccgggcatccttcgtgcggatggcgagatcgatcgcgggaaactgcgtgctatccgcttttcggacgaacaacaacgtaaggtgctgaattcgattgtaggtcctgcagtcctgaagaagatgctcgcggagtgggaagctcatatcgggtcaggcgccaagacggttgtgctggatatcccgctgctgttcgaatccggattgcaatcgtggatggacaaagttctcgtggtgtacgttgatgatgatgttcagttagggcgccttatggcacgtaacgggtttactgaagaagaagctctgatgcgcattcgttcacagtggcccagtgcggagaaagttaaacgtgcagacgctgtcatcgacaataatggcaatattgaagatacccgccgccagctgctggacattttacaccagtgggatctgctggacaaaggtggctccggccaccatcatcaccatcactaatga

SEQ ID NO: 4942 - protein, 211 aa, synthetic construct
  REGION 1..211: note = Variant of 3'O-kinase
MAVTIGLTGGIAAGKSTVSAMMRELGLPVIDADEAARAVMKPGEEAYRDIVAEFGPGILRADGEIDRGKLRAIRFSDEQQRKVLNSIVGPAVLKKMLAEWEAHIGSGAKTVVLDIPLLFESGLQSWMDKVLVVYVDDDVQLGRLMARNGFTEEEALMRIRSQWPSAEKVKRADAVIDNNGNIEDTRRQLLDILHQWDLLDKGGSGHHHHHH

SEQ ID NO: 4943 - DNA, 639 bp, synthetic construct
  misc_feature 1..639: note = Variant of 3'O-kinase
  source 1..639: mol_type = other DNA
atggcggttaccattggtttaacaggagggatcgcagcgggcaaatcgactgtgagtgccatgatgcgtgaactgggtctgccggtcatcgatgctgacgaggcagcacgcgccgttatgaagccaggcgaagaagcgtatcgcgacattgtagctgaattcgggccgggcatccttcgtgcggatggcgagatcgatcgcgggaaactgcgtgctatccgcttttcggacgaacaacaacgtaaggtgctgaattcgattgtaggtcctgcagtcctgaagaagatgctcgcggagtgggaagctcatatcgggtcaggcgccaagacggttgtgctggatatcccgctgctgttcgaatccggattgcaatcgtggatggacaaagttctcgtggtgtacgtttcggatgatgttcagttacgccgccttatggcacgtaacgggtttactgaagaagaagctctgatgcgcattcgttcacagtggcccagtgcggagaaagttaaacgtgcagacgctgtcatcgacaataatggcaatattgaagatacccgccgccagctgctggacattttacaccagtgggatctgctggacaaaggtggctccggccaccatcatcaccatcactaatga

SEQ ID NO: 4944 - protein, 211 aa, synthetic construct
  REGION 1..211: note = Variant of 3'O-kinase
MAVTIGLTGGIAAGKSTVSAMMRELGLPVIDADEAARAVMKPGEEAYRDIVAEFGPGILRADGEIDRGKLRAIRFSDEQQRKVLNSIVGPAVLKKMLAEWEAHIGSGAKTVVLDIPLLFESGLQSWMDKVLVVYVSDDVQLRRLMARNGFTEEEALMRIRSQWPSAEKVKRADAVIDNNGNIEDTRRQLLDILHQWDLLDKGGSGHHHHHH

SEQ ID NO: 4945 - DNA, 639 bp, synthetic construct
  misc_feature 1..639: note = Variant of 3'O-kinase
  source 1..639: mol_type = other DNA
atggcggttaccattggtttaacaggagggatcgcagcgggcaaatcgactgtgagtgccatgatgcgtgaactgggtctgccggtcatcgatgctgacgaggcagcacgcgccgttatgaagccaggcgaagaagcgtatcgcgacattgtagctgaattcgggccgggcatccttcgtgcggatggcgagatcgatcgcgggaaactgcgtgctatccgcttttcggacgaacaacaaaataaggtgctgaattcgattgtaggtcctgcagtcctgaagaagatgctcgcggagtgggaagctcatatcgggtcaggcgccaagacggttgtgctggatatcccgctgctgttcgaatccggattgcaatcgtggatggacaaagttctcgtggtgtacgttgatgatgatgttcagttacgccgccttatggcacgtaacgggtttactgaagaagaagctctgatgcgcattcgttcacagtggcccagtgcggagaaagttaaacgtgcagacgctgtcatcgacaataatggcaatattgaagatacccgccgccagctgctggacattttacaccagtgggatctgctggacaaaggtggctccggccaccatcatcaccatcactaatga

SEQ ID NO: 4946 - protein, 211 aa, synthetic construct
  REGION 1..211: note = Variant of 3'O-kinase
MAVTIGLTGGIAAGKSTVSAMMRELGLPVIDADEAARAVMKPGEEAYRDIVAEFGPGILRADGEIDRGKLRAIRFSDEQQNKVLNSIVGPAVLKKMLAEWEAHIGSGAKTVVLDIPLLFESGLQSWMDKVLVVYVDDDVQLRRLMARNGFTEEEALMRIRSQWPSAEKVKRADAVIDNNGNIEDTRRQLLDILHQWDLLDKGGSGHHHHHH

SEQ ID NO: 4947 - DNA, 639 bp, synthetic construct
  misc_feature 1..639: note = Variant of 3'O-kinase
  source 1..639: mol_type = other DNA
atggcggttaccattggtttaacaggagggatcgcagcgggcaaatcgactgtgagtgccatgatgcgtgaactgggtctgccggtcatcgatgctgacgaggcagcacgcgccgttatgaagccaggcgaagaagcgtatcgcgacattgtagctgaattcgggccgggcatccttcgtgcggatggcgagatcgatcgcgggaaactgcgtgctatccgcttttcggacgaacaacaacgtaaggtgctgaattcgattgtaggtcctgcagtcctgaagaagatgctcgcggagtgggaagctcatatcgggtcaggcgccaagacggttgtgctggatatcccgctgctgttcgaatccggattgcaatcgtggatggacaaagttctcgtggtgtacgttgatgatgatgttcaggtgcgccgccttatggcacgtaacgggtttactgaagaagaagctctgatgcgcattcgttcacagtggcccagtgcggagaaagttaaacgtgcagacgctgtcatcgacaataatggcaatattgaagatacccgccgccagctgctggacattttacaccagtgggatctgctggacaaaggtggctccggccaccatcatcaccatcactaatga

SEQ ID NO: 4948 - protein, 211 aa, synthetic construct
  REGION 1..211: note = Variant of 3'O-kinase
MAVTIGLTGGIAAGKSTVSAMMRELGLPVIDADEAARAVMKPGEEAYRDIVAEFGPGILRADGEIDRGKLRAIRFSDEQQRKVLNSIVGPAVLKKMLAEWEAHIGSGAKTVVLDIPLLFESGLQSWMDKVLVVYVDDDVQVRRLMARNGFTEEEALMRIRSQWPSAEKVKRADAVIDNNGNIEDTRRQLLDILHQWDLLDKGGSGHHHHHH

SEQ ID NO: 4949 - DNA, 639 bp, synthetic construct
  misc_feature 1..639: note = Variant of 3'O-kinase
  source 1..639: mol_type = other DNA
atggcggttaccattggtttaacaggagggatcgcagcgggcaaatcgactgtgagtgccatgatgcgtgaactgggtctgccggtcatcgatgctgacgaggcagcacgcgccgttatgaagccaggcgaagaagcgtatcgcgacattgtagctgaattcgggccgggcatccttcgtgcggatggcgagatcgatcgcagtaaactgcgtgctatccgcttttcggacgaacaacaacgtaaggtgctgaattcgattgtaggtcctgcagtcctgaagaagatgctcgcggagtgggaagctcatatcgggtcaggcgccaagacggttgtgctggatatcccgctgctgttcgaatccggattgcaatcgtggatggacaaagttctcgtggtgtacgttgatgatgatgttcagttacgccgccttatggcacgtaacgggtttactgaagaagaagctctgatgcgcattcgttcacagtggcccagtgcggagaaagttaaacgtgcagacgctgtcatcgacaataatggcaatattgaagatacccgccgccagctgctggacattttacaccagtgggatctgctggacaaaggtggctccggccaccatcatcaccatcactaatga

SEQ ID NO: 4950 - protein, 211 aa, synthetic construct
  REGION 1..211: note = Variant of 3'O-kinase
MAVTIGLTGGIAAGKSTVSAMMRELGLPVIDADEAARAVMKPGEEAYRDIVAEFGPGILRADGEIDRSKLRAIRFSDEQQRKVLNSIVGPAVLKKMLAEWEAHIGSGAKTVVLDIPLLFESGLQSWMDKVLVVYVDDDVQLRRLMARNGFTEEEALMRIRSQWPSAEKVKRADAVIDNNGNIEDTRRQLLDILHQWDLLDKGGSGHHHHHH

SEQ ID NO: 4951 - DNA, 639 bp, synthetic construct
  misc_feature 1..639: note = Variant of 3'O-kinase
  source 1..639: mol_type = other DNA
atggcggttaccattggtttaacaggagggatcgcagcgggcaaatcgactgtgagtgccatgatgcgtgaactgggtctgccggtcatcgatgctgacgaggcagcacgcgccgttatgaagccaggcgaagaagcgtatcgcgacattgtagctgaattcgggccgggcatccttcgtgcggatggcgagatcgatcgcgggaaactgcgtgctatccgcttttcggacgaacaacaacgtaaggtgctgaattcgattgtaggtcctgcagtcctgaagaagatgctcgcggagtgggaagctcatatcgggtcaggcgccaagacggttgtgctggatatcccgctgctgttcgaaacgggattgcaatcgtggatggacaaagttctcgtggtgtacgttgatgatgatgttcagttacgccgccttatggcacgtaacgggtttactgaagaagaagctctgatgcgcattcgttcacagtggcccagtgcggagaaagttaaacgtgcagacgctgtcatcgacaataatggcaatattgaagatacccgccgccagctgctggacattttacaccagtgggatctgctggacaaaggtggctccggccaccatcatcaccatcactaatga

SEQ ID NO: 4952 - protein, 211 aa, synthetic construct
  REGION 1..211: note = Variant of 3'O-kinase
MAVTIGLTGGIAAGKSTVSAMMRELGLPVIDADEAARAVMKPGEEAYRDIVAEFGPGILRADGEIDRGKLRAIRFSDEQQRKVLNSIVGPAVLKKMLAEWEAHIGSGAKTVVLDIPLLFETGLQSWMDKVLVVYVDDDVQLRRLMARNGFTEEEALMRIRSQWPSAEKVKRADAVIDNNGNIEDTRRQLLDILHQWDLLDKGGSGHHHHHH

SEQ ID NO: 4953 - DNA, 639 bp, synthetic construct
  misc_feature 1..639: note = Variant of 3'O-kinase
  source 1..639: mol_type = other DNA
atggcggttaccattggtttaacaggagggatcgcagcgggcaaatcgactgtgagtgccatgatgcgtgaactgggtctgccggtcatcgatgctgacgaggtggcacgcgccgttatgaagccaggcgaagaagcgtatcgcgacattgtagctgaattcgggccgggcatccttcgtgcggatggcgagatcgatcgcgggaaactgcgtgctatccgcttttcggacgaacaacaacgtaaggtgctgaattcgattgtaggtcctgcagtcctgaagaagatgctcgcggagtgggaagctcatatcgggtcaggcgccaagacggttgtgctggatatcccgctgctgttcgaatccggattgcaatcgtggatggacaaagttctcgtggtgtacgttgatgatgatgttcagttacgccgccttatggcacgtaacgggtttactgaagaagaagctctgatgcgcattcgttcacagtggcccagtgcggagaaagttaaacgtgcagacgctgtcatcgacaataatggcaatattgaagatacccgccgccagctgctggacattttacaccagtgggatctgctggacaaaggtggctccggccaccatcatcaccatcactaatga

SEQ ID NO: 4954 - protein, 211 aa, synthetic construct
  REGION 1..211: note = Variant of 3'O-kinase
MAVTIGLTGGIAAGKSTVSAMMRELGLPVIDADEVARAVMKPGEEAYRDIVAEFGPGILRADGEIDRGKLRAIRFSDEQQRKVLNSIVGPAVLKKMLAEWEAHIGSGAKTVVLDIPLLFESGLQSWMDKVLVVYVDDDVQLRRLMARNGFTEEEALMRIRSQWPSAEKVKRADAVIDNNGNIEDTRRQLLDILHQWDLLDKGGSGHHHHHH

SEQ ID NO: 4955 - DNA, 639 bp, synthetic construct
  misc_feature 1..639: note = Variant of 3'O-kinase
  source 1..639: mol_type = other DNA
atggcggttaccattggtttaacaggagggatcgcagcgggcaaatcgactgtgagtgccatgatgcgtgaactgggtctgccggtcatcgatgctgacgaggcagcacgcgccgttatgaagccaggcgaagaagcgtatcgcgacattgtagctgaattcgggccgggcatccttcgtgcggatggcgagatcgatcgcgggaaactgcgtgctatccgcttttcggacgaacaacaacgtaaggtgctgaattcgattgtaggtcctgcagtcctgaagaagatgctcgcggagtgggaagctcatatcgggtcaggcgccaagacggttgtgctggatatcccgctgctgttcgaatccggattgcaatcgtggatggacaaagttctcgtggtgtacgttgatagtgatgttcagttacgccgccttatggcacgtaacgggtttactgaagaagaagctctgatgcgcattcgttcacagtggcccagtgcggagaaagttaaacgtgcagacgctgtcatcgacaataatggcaatattgaagatacccgccgccagctgctggacattttacaccagtgggatctgctggacaaaggtggctccggccaccatcatcaccatcactaatga

SEQ ID NO: 4956 - protein, 211 aa, synthetic construct
  REGION 1..211: note = Variant of 3'O-kinase
MAVTIGLTGGIAAGKSTVSAMMRELGLPVIDADEAARAVMKPGEEAYRDIVAEFGPGILRADGEIDRGKLRAIRFSDEQQRKVLNSIVGPAVLKKMLAEWEAHIGSGAKTVVLDIPLLFESGLQSWMDKVLVVYVDSDVQLRRLMARNGFTEEEALMRIRSQWPSAEKVKRADAVIDNNGNIEDTRRQLLDILHQWDLLDKGGSGHHHHHH

SEQ ID NO: 4957 - DNA, 639 bp, synthetic construct
  misc_feature 1..639: note = Variant of 3'O-kinase
  source 1..639: mol_type = other DNA
atggcggttaccattggtttaacaggagggatcgcagcgggcaaatcgactgtgagtgccatgatgcgtgaactgggtctgccggtcatcgatgctgacgaggcagcacgcgccgttatgaagccaggcgaagaagcgtatcgcgacattgtagctgaattcgggccgggcatccttcgtgcggatggcgagatcgatcgcgggaaactggctgctatccgcttttcggacgaacaacaacgtaaggtgctgaattcgattgtaggtcctgcagtcctgaagaagatgctcgcggagtgggaagctcatatcgggtcaggcgccaagacggttgtgctggatatcccgctgctgttcgaatccggattgcaatcgtggatggacaaagttctcgtggtgtacgttgatgatgatgttcagttacgccgccttatggcacgtaacgggtttactgaagaagaagctctgatgcgcattcgttcacagtggcccagtgcggagaaagttaaacgtgcagacgctgtcatcgacaataatggcaatattgaagatacccgccgccagctgctggacattttacaccagtgggatctgctggacaaaggtggctccggccaccatcatcaccatcactaatga

SEQ ID NO: 4958 - protein, 211 aa, synthetic construct
  REGION 1..211: note = Variant of 3'O-kinase
MAVTIGLTGGIAAGKSTVSAMMRELGLPVIDADEAARAVMKPGEEAYRDIVAEFGPGILRADGEIDRGKLAAIRFSDEQQRKVLNSIVGPAVLKKMLAEWEAHIGSGAKTVVLDIPLLFESGLQSWMDKVLVVYVDDDVQLRRLMARNGFTEEEALMRIRSQWPSAEKVKRADAVIDNNGNIEDTRRQLLDILHQWDLLDKGGSGHHHHHH

SEQ ID NO: 4959 - DNA, 639 bp, synthetic construct
  misc_feature 1..639: note = Variant of 3'O-kinase
  source 1..639: mol_type = other DNA
atggcggttaccattggtttaacaggagggatcgcagcgggcaaatcgactgtgagtgccatgatgcgtgaactgggtctgccggtcatcgatgctgacgaggcagcacgcgccgttatgaagccaggcgaagaagcgtatcgcgacattgtagctgaattcgggccgggcatccttcgtgcggatggcgagatcgatcgcgggaaactgcgtgctatccgcttttcggacgaacaacaacgtaaggtgctgaattcgattgtaggtcctgcagtcctgaagaagatgctcgcggagtgggaagctcatatcgggtcaggcgccaagacggttgtgctggatatcccgctgctgttcgaatccggattgcaatcgtggatggacaaagttctcgtggtgtacgttgatgatgatgttcagttacgccgccttatggcacgtaacgggcatactgaagaagaagctctgatgcgcattcgttcacagtggcccagtgcggagaaagttaaacgtgcagacgctgtcatcgacaataatggcaatattgaagatacccgccgccagctgctggacattttacaccagtgggatctgctggacaaaggtggctccggccaccatcatcaccatcactaatga

SEQ ID NO: 4960 - protein, 211 aa, synthetic construct
  REGION 1..211: note = Variant of 3'O-kinase
MAVTIGLTGGIAAGKSTVSAMMRELGLPVIDADEAARAVMKPGEEAYRDIVAEFGPGILRADGEIDRGKLRAIRFSDEQQRKVLNSIVGPAVLKKMLAEWEAHIGSGAKTVVLDIPLLFESGLQSWMDKVLVVYVDDDVQLRRLMARNGHTEEEALMRIRSQWPSAEKVKRADAVIDNNGNIEDTRRQLLDILHQWDLLDKGGSGHHHHHH

SEQ ID NO: 4961 - DNA, 639 bp, synthetic construct
  misc_feature 1..639: note = Variant of 3'O-kinase
  source 1..639: mol_type = other DNA
atggcggttaccattggtttaacaggagggatcgcagcgggcaaatcgactgtgagtgccatgatgcgtgaactgggtctgccggtcatcgatgctgacgaggcagcacgcgccgttatgaagccaggcgaagaagcgtatcgcgacattgtagctgaattcgggccgggcatccttcgtgcggatggcgagatcgatcgcgggaaactgcgtgctatccgcttttcggacgaacaacaacgtaaggtgctgaattcgattgtaggtcctgcagtcctgaagaagatgctcgcggagtgggaagctcatatcgggtcaggcgccaagacggttgtgctggatatcccgctgctgttcgaatccggattgcaatcgtggatggacaaagttctcgtggtgtacgttgatgatgatgttcagttacgccgccttatggcacgtaacgggtttgcggaagaagaagctctgatgcgcattcgttcacagtggcccagtgcggagaaagttaaacgtgcagacgctgtcatcgacaataatggcaatattgaagatacccgccgccagctgctggacattttacaccagtgggatctgctggacaaaggtggctccggccaccatcatcaccatcactaatga

SEQ ID NO: 4962 - protein, 211 aa, synthetic construct
  REGION 1..211: note = Variant of 3'O-kinase
MAVTIGLTGGIAAGKSTVSAMMRELGLPVIDADEAARAVMKPGEEAYRDIVAEFGPGILRADGEIDRGKLRAIRFSDEQQRKVLNSIVGPAVLKKMLAEWEAHIGSGAKTVVLDIPLLFESGLQSWMDKVLVVYVDDDVQLRRLMARNGFAEEEALMRIRSQWPSAEKVKRADAVIDNNGNIEDTRRQLLDILHQWDLLDKGGSGHHHHHH

SEQ ID NO: 4963 - DNA, 639 bp, synthetic construct
  misc_feature 1..639: note = Variant of 3'O-kinase
  source 1..639: mol_type = other DNA
atggcggttaccattggtttaacaggagggatcgcagcgggcaaatcgactctgagtgccatgatgcgtgaactgggtctgccggtcatcgatgctgacgaggcagcacgcgccgttatgaagccaggcgaagaagcgtatcgcgacattgtagctgaattcgggccgggcatccttcgtgcggatggcgagatcgatcgcgggaaactgcgtgctatccgcttttcggacgaacaacaacgtaaggtgctgaattcgattgtaggtcctgcagtcctgaagaagatgctcgcggagtgggaagctcatatcgggtcaggcgccaagacggttgtgctggatatcccgctgctgttcgaatccggattgcaatcgtggatggacaaagttctcgtggtgtacgttgatgatgatgttcagttacgccgccttatggcacgtaacgggtttactgaagaagaagctctgatgcgcattcgttcacagtggcccagtgcggagaaagttaaacgtgcagacgctgtcatcgacaataatggcaatattgaagatacccgccgccagctgctggacattttacaccagtgggatctgctggacaaaggtggctccggccaccatcatcaccatcactaatga

SEQ ID NO: 4964 - protein, 211 aa, synthetic construct
  REGION 1..211: note = Variant of 3'O-kinase
MAVTIGLTGGIAAGKSTLSAMMRELGLPVIDADEAARAVMKPGEEAYRDIVAEFGPGILRADGEIDRGKLRAIRFSDEQQRKVLNSIVGPAVLKKMLAEWEAHIGSGAKTVVLDIPLLFESGLQSWMDKVLVVYVDDDVQLRRLMARNGFTEEEALMRIRSQWPSAEKVKRADAVIDNNGNIEDTRRQLLDILHQWDLLDKGGSGHHHHHH

SEQ ID NO: 4965 - DNA, 639 bp, synthetic construct
  misc_feature 1..639: note = Variant of 3'O-kinase
  source 1..639: mol_type = other DNA
atggcggttaccattggtgtgacaggagggatcgcagcgggcaaatcgactgtgagtgccatgatgcgtgaactgggtctgccggtcatcgatgctgacgaggcagcacgcgccgttatgaagccaggcgaagaagcgtatcgcgacattgtagctgaattcgggccgggcatccttcgtgcggatggcgagatcgatcgcgggaaactgcgtgctatccgcttttcggacgaacaacaacgtaaggtgctgaattcgattgtaggtcctgcagtcctgaagaagatgctcgcggagtgggaagctcatatcgggtcaggcgccaagacggttgtgctggatatcccgctgctgttcgaatccggattgcaatcgtggatggacaaagttctcgtggtgtacgttgatgatgatgttcagttacgccgccttatggcacgtaacgggtttactgaagaagaagctctgatgcgcattcgttcacagtggcccagtgcggagaaagttaaacgtgcagacgctgtcatcgacaataatggcaatattgaagatacccgccgccagctgctggacattttacaccagtgggatctgctggacaaaggtggctccggccaccatcatcaccatcactaatga

SEQ ID NO: 4966 - protein, 211 aa, synthetic construct
  REGION 1..211: note = Variant of 3'O-kinase
MAVTIGVTGGIAAGKSTVSAMMRELGLPVIDADEAARAVMKPGEEAYRDIVAEFGPGILRADGEIDRGKLRAIRFSDEQQRKVLNSIVGPAVLKKMLAEWEAHIGSGAKTVVLDIPLLFESGLQSWMDKVLVVYVDDDVQLRRLMARNGFTEEEALMRIRSQWPSAEKVKRADAVIDNNGNIEDTRRQLLDILHQWDLLDKGGSGHHHHHH

SEQ ID NO: 4967 - DNA, 639 bp, synthetic construct
  misc_feature 1..639: note = Variant of 3'O-kinase
  source 1..639: mol_type = other DNA
atggcggttaccattggtttaacaggagggatcgcagcgggcaaatcgactgtgagtgccatgatgcgtgaactgggtctgccggtcatcgatgctgacgaggcagcacgcgccgttatgaagccaggcgaagaagcgtatcgcgacattgtagctgaattcgggccgggcatccttcgtgcggatggcgagatcgatcgcgggaaactgcgtgctatccgcttttcggacgaacaacaacgtaaggtgctgaattcgattgtaggtcctgcagtcctgaagaagatgctcgcggagtgggaagctcatatcgggtcaggcgccaagacggttgtgctggatatcccgctgctgttcgaatccggattgcaatcgtggatggacaaagttctcgtggtgtacgttgatgatgatgttcagttacgccgccttatgaatcgtaacgggtttactgaagaagaagctctgatgcgcattcgttcacagtggcccagtgcggagaaagttaaacgtgcagacgctgtcatcgacaataatggcaatattgaagatacccgccgccagctgctggacattttacaccagtgggatctgctggacaaaggtggctccggccaccatcatcaccatcactaatga

SEQ ID NO: 4968 - protein, 211 aa, synthetic construct
  REGION 1..211: note = Variant of 3'O-kinase
MAVTIGLTGGIAAGKSTVSAMMRELGLPVIDADEAARAVMKPGEEAYRDIVAEFGPGILRADGEIDRGKLRAIRFSDEQQRKVLNSIVGPAVLKKMLAEWEAHIGSGAKTVVLDIPLLFESGLQSWMDKVLVVYVDDDVQLRRLMNRNGFTEEEALMRIRSQWPSAEKVKRADAVIDNNGNIEDTRRQLLDILHQWDLLDKGGSGHHHHHH

SEQ ID NO: 4969 - DNA, 639 bp, synthetic construct
  misc_feature 1..639: note = Variant of 3'O-kinase
  source 1..639: mol_type = other DNA
atggcggttaccattggtttaacaggagggatcgcagcgggcaaatcgactgtgagtgccatgatgcgtgaactgggtctgccggtcatcgatgctgacgaggcagcacgcgccgttatgaagccaggcgaagaagcgtatcgcgacattgtagctgaattcgggccgggcatccttcgtgcggatggcgagatcgatcgcgggaaactgcgtgctatccgcaattcggacgaacaacaacgtaaggtgctgaattcgattgtaggtcctgcagtcctgaagaagatgctcgcggagtgggaagctcatatcgggtcaggcgccaagacggttgtgctggatatcccgctgctgttcgaatccggattgcaatcgtggatggacaaagttctcgtggtgtacgttgatgatgatgttcagttacgccgccttatggcacgtaacgggtttactgaagaagaagctctgatgcgcattcgttcacagtggcccagtgcggagaaagttaaacgtgcagacgctgtcatcgacaataatggcaatattgaagatacccgccgccagctgctggacattttacaccagtgggatctgctggacaaaggtggctccggccaccatcatcaccatcactaatga

SEQ ID NO: 4970 - protein, 211 aa, synthetic construct
  REGION 1..211: note = Variant of 3'O-kinase
MAVTIGLTGGIAAGKSTVSAMMRELGLPVIDADEAARAVMKPGEEAYRDIVAEFGPGILRADGEIDRGKLRAIRNSDEQQRKVLNSIVGPAVLKKMLAEWEAHIGSGAKTVVLDIPLLFESGLQSWMDKVLVVYVDDDVQLRRLMARNGFTEEEALMRIRSQWPSAEKVKRADAVIDNNGNIEDTRRQLLDILHQWDLLDKGGSGHHHHHH

SEQ ID NO: 4971 - DNA, 639 bp, synthetic construct
  misc_feature 1..639: note = Variant of 3'O-kinase
  source 1..639: mol_type = other DNA
atggcggttaccattggtttaacaggagggatcgcagcgggcaaatcgactgtgagtgccatgatgcgtgaactgggtctgccggtcatcgatgctgacgaggcagcacgcgccgttatgaagccaggcgaagaagcgtatcgcgacattgtagctgaattcgggccgggcatccttcgtgcggatggcgagatcgatcgcgggaaactgcgtgctatccgcttttcggacgaacaacaacgtaaggtgctgaattcgattgtaggtcctgcagtcctgaagaagatgctcgcggagtgggaagctcatatcgggtcaggcgccaagacggttgtgctggatatcccgctgctgttcgaatccggattgcaatcgtggatggacaaagttctcgtggtgtacgttgatgatgatgttcagttacgccgccttatggcacgtaacgggtgtactgaagaagaagctctgatgcgcattcgttcacagtggcccagtgcggagaaagttaaacgtgcagacgctgtcatcgacaataatggcaatattgaagatacccgccgccagctgctggacattttacaccagtgggatctgctggacaaaggtggctccggccaccatcatcaccatcactaatga

SEQ ID NO: 4972 - protein, 211 aa, synthetic construct
  REGION 1..211: note = Variant of 3'O-kinase
MAVTIGLTGGIAAGKSTVSAMMRELGLPVIDADEAARAVMKPGEEAYRDIVAEFGPGILRADGEIDRGKLRAIRFSDEQQRKVLNSIVGPAVLKKMLAEWEAHIGSGAKTVVLDIPLLFESGLQSWMDKVLVVYVDDDVQLRRLMARNGCTEEEALMRIRSQWPSAEKVKRADAVIDNNGNIEDTRRQLLDILHQWDLLDKGGSGHHHHHH

SEQ ID NO: 4973 - DNA, 639 bp, synthetic construct
  misc_feature 1..639: note = Variant of 3'O-kinase
  source 1..639: mol_type = other DNA
atggcggttaccattggtttaacaggagggatcgcagcgggcaaatcgactgtgagtgccatgatgcgtgaactgggtctgccggtcatcgatgctgacgaggcagcacgcgccgttatgaagccaggcgaagaagcgtatcgcgacattgtagctgaattcgggccgggcatccttcgtgcggatggcgagatcgataaggggaaactgcgtgctatccgcttttcggacgaacaacaacgtaaggtgctgaattcgattgtaggtcctgcagtcctgaagaagatgctcgcggagtgggaagctcatatcgggtcaggcgccaagacggttgtgctggatatcccgctgctgttcgaatccggattgcaatcgtggatggacaaagttctcgtggtgtacgttgatgatgatgttcagttacgccgccttatggcacgtaacgggtttactgaagaagaagctctgatgcgcattcgttcacagtggcccagtgcggagaaagttaaacgtgcagacgctgtcatcgacaataatggcaatattgaagatacccgccgccagctgctggacattttacaccagtgggatctgctggacaaaggtggctccggccaccatcatcaccatcactaatga

SEQ ID NO: 4974 - protein, 211 aa, synthetic construct
  REGION 1..211: note = Variant of 3'O-kinase
MAVTIGLTGGIAAGKSTVSAMMRELGLPVIDADEAARAVMKPGEEAYRDIVAEFGPGILRADGEIDKGKLRAIRFSDEQQRKVLNSIVGPAVLKKMLAEWEAHIGSGAKTVVLDIPLLFESGLQSWMDKVLVVYVDDDVQLRRLMARNGFTEEEALMRIRSQWPSAEKVKRADAVIDNNGNIEDTRRQLLDILHQWDLLDKGGSGHHHHHH

SEQ ID NO: 4975 - DNA, 639 bp, synthetic construct
  misc_feature 1..639: note = Variant of 3'O-kinase
  source 1..639: mol_type = other DNA
atggcggttaccattggtttaacaggagggatcgcagcgggcaaatcgactgtgagtgccatgatgcgtgaactgggtctgccggtcatcgatgctgacgaggcagcacgcgccgttatgaagccaggcgaagaagcgtatcgcgacattgtagctgaattcgggccgggcatccttcgtgcggatggcgagatcgatcgcgggaaactgcgtgctatccgcttttcggacgaacaacaacgtaaggtgctgaattcgattgtaggtcctgcagtcctgaagaagatgctcgcggagtgggaagctcatatcgggtcaggcgccaagacggttgtgctggatatcccgctgctgttcgaatccggattgcaatcgtggatggacaaagttctcgtggtgtacgttgatgatgatgttcagttacgccgccttatggcacgtaacgggtttactgaagcggaagctctgatgcgcattcgttcacagtggcccagtgcggagaaagttaaacgtgcagacgctgtcatcgacaataatggcaatattgaagatacccgccgccagctgctggacattttacaccagtgggatctgctggacaaaggtggctccggccaccatcatcaccatcactaatga

SEQ ID NO: 4976 - protein, 211 aa, synthetic construct
  REGION 1..211: note = Variant of 3'O-kinase
MAVTIGLTGGIAAGKSTVSAMMRELGLPVIDADEAARAVMKPGEEAYRDIVAEFGPGILRADGEIDRGKLRAIRFSDEQQRKVLNSIVGPAVLKKMLAEWEAHIGSGAKTVVLDIPLLFESGLQSWMDKVLVVYVDDDVQLRRLMARNGFTEAEALMRIRSQWPSAEKVKRADAVIDNNGNIEDTRRQLLDILHQWDLLDKGGSGHHHHHH

SEQ ID NO: 4977 - DNA, 639 bp, synthetic construct
  misc_feature 1..639: note = Variant of 3'O-kinase
  source 1..639: mol_type = other DNA
atggcggttaccattggtttaacaggagggatcgcagcgggcaaatcgactgtgagtgccatgatgcgtgaactgggtctgccggtcatcgatgctgacgaggcagcacgcgccgttatgaagccaggcgaagaagcgtatcgcgacattgtagctgaattcgggccgggcatccttcgtgcggatggcgagatcgatcgcgggaaactgcgtgctatccgcttttcggacgaacaacaacgtaaggtgctgaattcgattgtaggtcctgcagtcctgaagaagatgctcgcggagtgggaagctcatatcgggtcaggcgccaagacggttgtgctggatatcccgctgctgttcgaatccggattgcaatcgtggatggacaaagttctcgtggtgtacgttgatgatgatgttcagttacgccgccttatggcacgtaacgggtttactgaagaagaagctctgatgcgcattcgttcacagtggcccagtgcggagaaagttaaacgtgcagacgctgtcatcgacaataatggcaatccggaagatacccgccgccagctgctggacattttacaccagtgggatctgctggacaaaggtggctccggccaccatcatcaccatcactaatga

SEQ ID NO: 4978 - protein, 211 aa, synthetic construct
  REGION 1..211: note = Variant of 3'O-kinase
MAVTIGLTGGIAAGKSTVSAMMRELGLPVIDADEAARAVMKPGEEAYRDIVAEFGPGILRADGEIDRGKLRAIRFSDEQQRKVLNSIVGPAVLKKMLAEWEAHIGSGAKTVVLDIPLLFESGLQSWMDKVLVVYVDDDVQLRRLMARNGFTEEEALMRIRSQWPSAEKVKRADAVIDNNGNPEDTRRQLLDILHQWDLLDKGGSGHHHHHH

SEQ ID NO: 4979 - DNA, 639 bp, synthetic construct
  misc_feature 1..639: note = Variant of 3'O-kinase
  source 1..639: mol_type = other DNA
atggcggttaccattggtttaacaggagggatcgcagcgggcaaatcgactgtgagtgccatgatgcgtgaactgggtctgccggtcatcgatgctgacgaggcagcacgcgccgttatgaagccaggcgaagaagcgtatcgcgacattgtagctgaattcgggccgggcatccttcgtgcggatggcgagatcgatcgcgggaaactgcgtgctatccgcttttcggacgaacaacaacgtaaggtgctgaattcgattgtaggtcctgcagtcctgaagaagatgctcgcggagtgggaagctcatatcgggtcaggcgccaagacggttgtgctggatatcccgctgctgttcgaatccggattgcaatcgtggatggacaaagttctcgtggtgtacgttgatgatgatgttcagttacgccgccttatggcacgtaacgggtttactgaagaagaagctctgatgcgcattcgttcacagtggcccagtgcggagaaagttaaacgtgcagacgctgtcatcgacaataatggcaatattgaagatgcgcgccgccagctgctggacattttacaccagtgggatctgctggacaaaggtggctccggccaccatcatcaccatcactaatga

SEQ ID NO: 4980 - protein, 211 aa, synthetic construct
  REGION 1..211: note = Variant of 3'O-kinase
MAVTIGLTGGIAAGKSTVSAMMRELGLPVIDADEAARAVMKPGEEAYRDIVAEFGPGILRADGEIDRGKLRAIRFSDEQQRKVLNSIVGPAVLKKMLAEWEAHIGSGAKTVVLDIPLLFESGLQSWMDKVLVVYVDDDVQLRRLMARNGFTEEEALMRIRSQWPSAEKVKRADAVIDNNGNIEDARRQLLDILHQWDLLDKGGSGHHHHHH

SEQ ID NO: 4981 - DNA, 639 bp, synthetic construct
  misc_feature 1..639: note = Variant of 3'O-kinase
  source 1..639: mol_type = other DNA
atggcggttaccattggtttaacaggagggatcgcagcgggcaaatcgactgtgagtgccatgatgcgtgaactgggtctgccggtcatcgatgctgacgaggcagcacgcgccgttatgaagccaggcgaagaagcgtatcgcgacattgtagctgaattcgggccgggcatccttcgtgcggatggcgagatcgatcgctataaactgcgtgctatccgcttttcggacgaacaacaacgtaaggtgctgaattcgattgtaggtcctgcagtcctgaagaagatgctcgcggagtgggaagctcatatcgggtcaggcgccaagacggttgtgctggatatcccgctgctgttcgaatccggattgcaatcgtggatggacaaagttctcgtggtgtacgttgatgatgatgttcagttacgccgccttatggcacgtaacgggtttactgaagaagaagctctgatgcgcattcgttcacagtggcccagtgcggagaaagttaaacgtgcagacgctgtcatcgacaataatggcaatattgaagatacccgccgccagctgctggacattttacaccagtgggatctgctggacaaaggtggctccggccaccatcatcaccatcactaatga

SEQ ID NO: 4982 - protein, 211 aa, synthetic construct
  REGION 1..211: note = Variant of 3'O-kinase
MAVTIGLTGGIAAGKSTVSAMMRELGLPVIDADEAARAVMKPGEEAYRDIVAEFGPGILRADGEIDRYKLRAIRFSDEQQRKVLNSIVGPAVLKKMLAEWEAHIGSGAKTVVLDIPLLFESGLQSWMDKVLVVYVDDDVQLRRLMARNGFTEEEALMRIRSQWPSAEKVKRADAVIDNNGNIEDTRRQLLDILHQWDLLDKGGSGHHHHHH

SEQ ID NO: 4983 - DNA, 639 bp, synthetic construct
  misc_feature 1..639: note = Variant of 3'O-kinase
  source 1..639: mol_type = other DNA
atggcggttaccattggtttaacaggagggatcgcagcgggcaaatcgactgtgagtgccatgatgcgtgaactgggtctgccggtcatcgatgctgacgaggcagcacgcgccgttatgaagccaggcgaagaagcgtatcgcgacattgtagctgaattcgggccgggcatccttcgtgcggatggcgagatcgatcgcgggaaactgcgtgctatccgcttttcggacgaacaacaacgtaaggtgctgaattcgattgtaggtcctgcagtcctgaagaagatgctcgcggagtgggaagctcatatcgggtcaggcgccaagacggttgtgctggatatcccgctgctgttcgaatccggattgcaatcgtggatggacaaagttctcgtggtgtacgttgatgatgatgttcagttacgccgccttatggcacgtaacgggtttactgaagaagaagctctgatgcgcattacttcacagtggcccagtgcggagaaagttaaacgtgcagacgctgtcatcgacaataatggcaatattgaagatacccgccgccagctgctggacattttacaccagtgggatctgctggacaaaggtggctccggccaccatcatcaccatcactaatga

SEQ ID NO: 4984 - protein, 211 aa, synthetic construct
  REGION 1..211: note = Variant of 3'O-kinase
MAVTIGLTGGIAAGKSTVSAMMRELGLPVIDADEAARAVMKPGEEAYRDIVAEFGPGILRADGEIDRGKLRAIRFSDEQQRKVLNSIVGPAVLKKMLAEWEAHIGSGAKTVVLDIPLLFESGLQSWMDKVLVVYVDDDVQLRRLMARNGFTEEEALMRITSQWPSAEKVKRADAVIDNNGNIEDTRRQLLDILHQWDLLDKGGSGHHHHHH

SEQ ID NO: 4985 - DNA, 639 bp, synthetic construct
  misc_feature 1..639: note = Variant of 3'O-kinase
  source 1..639: mol_type = other DNA
atggcggttaccattggtttaacaggagggatcgcagcgggcaaatcgactgtgagtgccatgatgcgtgaactgggtctgccggtcatcgatgctgacgaggcagcacgcgccgttatgaagccaggcgaagaagcgtatcgcgacattgtagctgaattcgggccgggcatccttcgtgcggatggcgagatcgatcgcgggaaactgcgtgctatccgcttttcggacgaacaacaacgtaaggtgctgaattcgattgtaggtcctgcagtcctgaagaagatgctcgcggagtgggaagctcatatcgggtcaggcgccaagacggttgtgctggatatcccgctgctgttcgaatccggattgcaatcgtggatggacaaagttctcgtggtgtacgttgatgatgatgttcagttacgccgccttatggcacgtaacgggtttactgaagaagaagctctgatgcgcattagttcacagtggcccagtgcggagaaagttaaacgtgcagacgctgtcatcgacaataatggcaatattgaagatacccgccgccagctgctggacattttacaccagtgggatctgctggacaaaggtggctccggccaccatcatcaccatcactaatga

SEQ ID NO: 4986 - protein, 211 aa, synthetic construct
  REGION 1..211: note = Variant of 3'O-kinase
MAVTIGLTGGIAAGKSTVSAMMRELGLPVIDADEAARAVMKPGEEAYRDIVAEFGPGILRADGEIDRGKLRAIRFSDEQQRKVLNSIVGPAVLKKMLAEWEAHIGSGAKTVVLDIPLLFESGLQSWMDKVLVVYVDDDVQLRRLMARNGFTEEEALMRISSQWPSAEKVKRADAVIDNNGNIEDTRRQLLDILHQWDLLDKGGSGHHHHHH

SEQ ID NO: 4987 - DNA, 639 bp, synthetic construct
  misc_feature 1..639: note = Variant of 3'O-kinase
  source 1..639: mol_type = other DNA
atggcggttaccattggtttaacaggagggatcgcagcgggcaaatcgactgtgagtgccatgatgcgtgaactgggtctgccggtcatcgatgctgacgaggcagcacgcgccgttatgaagccaggcgaagaagcgtatcgcgacattgtagctgaattcgggccgggcatccttcgtgcggatggcgagatcgatcgcgggaaactgcgtgctatccgcttttcggacgaacaacaacgtaaggtgctgaattcgattgtaggtcctgcagtcctgaagaagatgctcgcggagtgggaagctcatatcgggtcaggcgccaagacggttgtgctggatatcccgctgctgttcgaatccggattgcaatcgtggatggacaaagttctcgtggtgtacgttgatgatgatgttcagttacgccgccttatggcacgtaacgggtttactgaagaagaagctctgatgcgcattgtgtcacagtggcccagtgcggagaaagttaaacgtgcagacgctgtcatcgacaataatggcaatattgaagatacccgccgccagctgctggacattttacaccagtgggatctgctggacaaaggtggctccggccaccatcatcaccatcactaatga

SEQ ID NO: 4988 - protein, 211 aa, synthetic construct
  REGION 1..211: note = Variant of 3'O-kinase
MAVTIGLTGGIAAGKSTVSAMMRELGLPVIDADEAARAVMKPGEEAYRDIVAEFGPGILRADGEIDRGKLRAIRFSDEQQRKVLNSIVGPAVLKKMLAEWEAHIGSGAKTVVLDIPLLFESGLQSWMDKVLVVYVDDDVQLRRLMARNGFTEEEALMRIVSQWPSAEKVKRADAVIDNNGNIEDTRRQLLDILHQWDLLDKGGSGHHHHHH

SEQ ID NO: 4989 - DNA, 639 bp, synthetic construct
  misc_feature 1..639: note = Variant of 3'O-kinase
  source 1..639: mol_type = other DNA
atggcggttaccattggtttaacaggagggatcgcagcgggcaaatcgactgtgagtgccatgatgcgtgaactgggtctgccggtcatcgatgctgacgagatggcacgcgccgttatgaagccaggcgaagaagcgtatcgcgacattgtagctgaattcgggccgggcatccttcgtgcggatggcgagatcgatcgcgggaaactgcgtgctatccgcttttcggacgaacaacaacgtaaggtgctgaattcgattgtaggtcctgcagtcctgaagaagatgctcgcggagtgggaagctcatatcgggtcaggcgccaagacggttgtgctggatatcccgctgctgttcgaatccggattgcaatcgtggatggacaaagttctcgtggtgtacgttgatgatgatgttcagttacgccgccttatggcacgtaacgggtttactgaagaagaagctctgatgcgcattcgttcacagtggcccagtgcggagaaagttaaacgtgcagacgctgtcatcgacaataatggcaatattgaagatacccgccgccagctgctggacattttacaccagtgggatctgctggacaaaggtggctccggccaccatcatcaccatcactaatga

SEQ ID NO: 4990 - protein, 211 aa, synthetic construct
  REGION 1..211: note = Variant of 3'O-kinase
MAVTIGLTGGIAAGKSTVSAMMRELGLPVIDADEMARAVMKPGEEAYRDIVAEFGPGILRADGEIDRGKLRAIRFSDEQQRKVLNSIVGPAVLKKMLAEWEAHIGSGAKTVVLDIPLLFESGLQSWMDKVLVVYVDDDVQLRRLMARNGFTEEEALMRIRSQWPSAEKVKRADAVIDNNGNIEDTRRQLLDILHQWDLLDKGGSGHHHHHH

SEQ ID NO: 4991 - DNA, 639 bp, synthetic construct
  misc_feature 1..639: note = Variant of 3'O-kinase
  source 1..639: mol_type = other DNA
atggcggttaccattggtttaacaggagggatcgcagcgggcaaatcgactgtgagtgccatgatgcgtgaactgggtctgccggtcatcgatgctgacgaggcagcacgcgccgttatgaagccaggcgaagaagcgtatcgcgacattgtagctgaattcgggccgggcatccttcgtgcggatggcgagatcgatcgcgggaaactgcgtgctatccgcttttcggacgaacaacaacgtaaggtgctgaattcgattgtaggtcctgcagtcctgaagaagatgctcgcggagtgggaagctcatatcgggtcaggcgccaagacggttgtgctggatatcccgctgctgttcgaatccggattgcaatcgtgggctgacaaagttctcgtggtgtacgttgatgatgatgttcagttacgccgccttatggcacgtaacgggtttactgaagaagaagctctgatgcgcattcgttcacagtggcccagtgcggagaaagttaaacgtgcagacgctgtcatcgacaataatggcaatattgaagatacccgccgccagctgctggacattttacaccagtgggatctgctggacaaaggtggctccggccaccatcatcaccatcactaatga

SEQ ID NO: 4992 - protein, 211 aa, synthetic construct
  REGION 1..211: note = Variant of 3'O-kinase
MAVTIGLTGGIAAGKSTVSAMMRELGLPVIDADEAARAVMKPGEEAYRDIVAEFGPGILRADGEIDRGKLRAIRFSDEQQRKVLNSIVGPAVLKKMLAEWEAHIGSGAKTVVLDIPLLFESGLQSWADKVLVVYVDDDVQLRRLMARNGFTEEEALMRIRSQWPSAEKVKRADAVIDNNGNIEDTRRQLLDILHQWDLLDKGGSGHHHHHH

SEQ ID NO: 4993 - DNA, 639 bp, synthetic construct
  misc_feature 1..639: note = Variant of 3'O-kinase
  source 1..639: mol_type = other DNA
atggcggttaccattggtttaacaggagggatcgcagcgggcaaatcgactgtgagtgccatgatgcgtgaactgggtctgccggtcatcgatgctgacgaggcagcacgcgccgttatgaagccaggcgaagaagcgtatcgcgacattgtagctgaattcgggccgggcatccttcgtgcggatggcgagatcgatcgcgggaaactgcgtgctatccgcttttcggacgaacaacaacgtaaggtgctgaattcgattgtaggtcctgcagtcctgaagaagatgctcgcggagtgggaagctcatatcgggtcaggcgccaagacggttgtgtgggatatcccgctgctgttcgaatccggattgcaatcgtggatggacaaagttctcgtggtgtacgttgatgatgatgttcagttacgccgccttatggcacgtaacgggtttactgaagaagaagctctgatgcgcattcgttcacagtggcccagtgcggagaaagttaaacgtgcagacgctgtcatcgacaataatggcaatattgaagatacccgccgccagctgctggacattttacaccagtgggatctgctggacaaaggtggctccggccaccatcatcaccatcactaatga

SEQ ID NO: 4994 - protein, 211 aa, synthetic construct
  REGION 1..211: note = Variant of 3'O-kinase
MAVTIGLTGGIAAGKSTVSAMMRELGLPVIDADEAARAVMKPGEEAYRDIVAEFGPGILRADGEIDRGKLRAIRFSDEQQRKVLNSIVGPAVLKKMLAEWEAHIGSGAKTVVWDIPLLFESGLQSWMDKVLVVYVDDDVQLRRLMARNGFTEEEALMRIRSQWPSAEKVKRADAVIDNNGNIEDTRRQLLDILHQWDLLDKGGSGHHHHHH

SEQ ID NO: 4995 - DNA, 639 bp, synthetic construct
  misc_feature 1..639: note = Variant of 3'O-kinase
  source 1..639: mol_type = other DNA
atggcggttaccattggtttaacaggagggatcgcagcgggcaaatcgactgtgagtgccatgatgcgtgaactgggtctgccggtcgtggatgctgacgaggcagcacgcgccgttatgaagccaggcgaagaagcgtatcgcgacattgtagctgaattcgggccgggcatccttcgtgcggatggcgagatcgatcgcgggaaactgcgtgctatccgcttttcggacgaacaacaacgtaaggtgctgaattcgattgtaggtcctgcagtcctgaagaagatgctcgcggagtgggaagctcatatcgggtcaggcgccaagacggttgtgctggatatcccgctgctgttcgaatccggattgcaatcgtggatggacaaagttctcgtggtgtacgttgatgatgatgttcagttacgccgccttatggcacgtaacgggtttactgaagaagaagctctgatgcgcattcgttcacagtggcccagtgcggagaaagttaaacgtgcagacgctgtcatcgacaataatggcaatattgaagatacccgccgccagctgctggacattttacaccagtgggatctgctggacaaaggtggctccggccaccatcatcaccatcactaatga

SEQ ID NO: 4996 - protein, 211 aa, synthetic construct
  REGION 1..211: note = Variant of 3'O-kinase
MAVTIGLTGGIAAGKSTVSAMMRELGLPVVDADEAARAVMKPGEEAYRDIVAEFGPGILRADGEIDRGKLRAIRFSDEQQRKVLNSIVGPAVLKKMLAEWEAHIGSGAKTVVLDIPLLFESGLQSWMDKVLVVYVDDDVQLRRLMARNGFTEEEALMRIRSQWPSAEKVKRADAVIDNNGNIEDTRRQLLDILHQWDLLDKGGSGHHHHHH

SEQ ID NO: 4997 - DNA, 639 bp, synthetic construct
  misc_feature 1..639: note = Variant of 3'O-kinase
  source 1..639: mol_type = other DNA
atggcggttaccattggtttaacaggagggatcgcagcgggcaaatcgactgtgagtgccatgatgcgtgaactgggtctgccggtcatcgatgctgacgaggcagcacgcgccgttatgaagccaggcgaagaagcgtatcgcgacattgtagctgaattcgggccgggcatccttcgtgcggatggcgagatcgatcgcgggaaactgcgtgctatccgcttttcggacgaacaacaacgtaaggtgctgaattcgattgtaggtcctgcagtcctgaaggttatgctcgcggagtgggaagctcatatcgggtcaggcgccaagacggttgtgctggatatcccgctgctgttcgaatccggattgcaatcgtggatggacaaagttctcgtggtgtacgttgatgatgatgttcagttacgccgccttatggcacgtaacgggtttactgaagaagaagctctgatgcgcattcgttcacagtggcccagtgcggagaaagttaaacgtgcagacgctgtcatcgacaataatggcaatattgaagatacccgccgccagctgctggacattttacaccagtgggatctgctggacaaaggtggctccggccaccatcatcaccatcactaatga

SEQ ID NO: 4998 - protein, 211 aa, synthetic construct
  REGION 1..211: note = Variant of 3'O-kinase
MAVTIGLTGGIAAGKSTVSAMMRELGLPVIDADEAARAVMKPGEEAYRDIVAEFGPGILRADGEIDRGKLRAIRFSDEQQRKVLNSIVGPAVLKVMLAEWEAHIGSGAKTVVLDIPLLFESGLQSWMDKVLVVYVDDDVQLRRLMARNGFTEEEALMRIRSQWPSAEKVKRADAVIDNNGNIEDTRRQLLDILHQWDLLDKGGSGHHHHHH

SEQ ID NO: 4999 - DNA, 639 bp, synthetic construct
  misc_feature 1..639: note = Variant of 3'O-kinase
  source 1..639: mol_type = other DNA
atggcggttaccattggtttaacaggagggatcgcagcgggcaaatcgactgtgagtgccatgatgcgtgaactgggtctgccggtcatcgatgctgacgaggcagcacgcgccgttcggaagccaggcgaagaagcgtatcgcgacattgtagctgaattcgggccgggcatccttcgtgcggatggcgagatcgatcgcgggaaactgcgtgctatccgcttttcggacgaacaacaacgtaaggtgctgaattcgattgtaggtcctgcagtcctgaagaagatgctcgcggagtgggaagctcatatcgggtcaggcgccaagacggttgtgctggatatcccgctgctgttcgaatccggattgcaatcgtggatggacaaagttctcgtggtgtacgttgatgatgatgttcagttacgccgccttatggcacgtaacgggtttactgaagaagaagctctgatgcgcattcgttcacagtggcccagtgcggagaaagttaaacgtgcagacgctgtcatcgacaataatggcaatattgaagatacccgccgccagctgctggacattttacaccagtgggatctgctggacaaaggtggctccggccaccatcatcaccatcactaatga

SEQ ID NO: 5000 - protein, 211 aa, synthetic construct
  REGION 1..211: note = Variant of 3'O-kinase
MAVTIGLTGGIAAGKSTVSAMMRELGLPVIDADEAARAVRKPGEEAYRDIVAEFGPGILRADGEIDRGKLRAIRFSDEQQRKVLNSIVGPAVLKKMLAEWEAHIGSGAKTVVLDIPLLFESGLQSWMDKVLVVYVDDDVQLRRLMARNGFTEEEALMRIRSQWPSAEKVKRADAVIDNNGNIEDTRRQLLDILHQWDLLDKGGSGHHHHHH

SEQ ID NO: 5001 - DNA, 639 bp, synthetic construct
  misc_feature 1..639: note = Variant of 3'O-kinase
  source 1..639: mol_type = other DNA
atggcggttaccattggtttaacaggagggatcgcagcgggcaaatcgactgtgagtgccatgatgcgtgaactgggtctgccggtcatcgatgctgacgaggcagcacgcgccgttatgaagccaggcgaagaagcgtatcgcgacattgtagctgaattcgggccgggcatccttcgtgcggatggcgagatcgatcgcgggaaactgcgtgctatccgcttttcggacgaacaacaacgtaaggtgctgaattcgattgtaatgcctgcagtcctgaagaagatgctcgcggagtgggaagctcatatcgggtcaggcgccaagacggttgtgctggatatcccgctgctgttcgaatccggattgcaatcgtggatggacaaagttctcgtggtgtacgttgatgatgatgttcagttacgccgccttatggcacgtaacgggtttactgaagaagaagctctgatgcgcattcgttcacagtggcccagtgcggagaaagttaaacgtgcagacgctgtcatcgacaataatggcaatattgaagatacccgccgccagctgctggacattttacaccagtgggatctgctggacaaaggtggctccggccaccatcatcaccatcactaatga

SEQ ID NO: 5002 - protein, 211 aa, synthetic construct
  REGION 1..211: note = Variant of 3'O-kinase
MAVTIGLTGGIAAGKSTVSAMMRELGLPVIDADEAARAVMKPGEEAYRDIVAEFGPGILRADGEIDRGKLRAIRFSDEQQRKVLNSIVMPAVLKKMLAEWEAHIGSGAKTVVLDIPLLFESGLQSWMDKVLVVYVDDDVQLRRLMARNGFTEEEALMRIRSQWPSAEKVKRADAVIDNNGNIEDTRRQLLDILHQWDLLDKGGSGHHHHHH

SEQ ID NO: 5003 - DNA, 639 bp, synthetic construct
  misc_feature 1..639: note = Variant of 3'O-kinase
  source 1..639: mol_type = other DNA
atggcggttaccattggtttaacaggagggatcgcagcgggcaaatcgactgtgagtgccatgatgcgtgaactgggtctgccggtcatcgatgctgacgagcgggcacgcgccgttatgaagccaggcgaagaagcgtatcgcgacattgtagctgaattcgggccgggcatccttcgtgcggatggcgagatcgatcgcgggaaactgcgtgctatccgcttttcggacgaacaacaacgtaaggtgctgaattcgattgtaggtcctgcagtcctgaagaagatgctcgcggagtgggaagctcatatcgggtcaggcgccaagacggttgtgctggatatcccgctgctgttcgaatccggattgcaatcgtggatggacaaagttctcgtggtgtacgttgatgatgatgttcagttacgccgccttatggcacgtaacgggtttactgaagaagaagctctgatgcgcattcgttcacagtggcccagtgcggagaaagttaaacgtgcagacgctgtcatcgacaataatggcaatattgaagatacccgccgccagctgctggacattttacaccagtgggatctgctggacaaaggtggctccggccaccatcatcaccatcactaatga

SEQ ID NO: 5004 - protein, 211 aa, synthetic construct
  REGION 1..211: note = Variant of 3'O-kinase
MAVTIGLTGGIAAGKSTVSAMMRELGLPVIDADERARAVMKPGEEAYRDIVAEFGPGILRADGEIDRGKLRAIRFSDEQQRKVLNSIVGPAVLKKMLAEWEAHIGSGAKTVVLDIPLLFESGLQSWMDKVLVVYVDDDVQLRRLMARNGFTEEEALMRIRSQWPSAEKVKRADAVIDNNGNIEDTRRQLLDILHQWDLLDKGGSGHHHHHH

SEQ ID NO: 5005 - DNA, 639 bp, synthetic construct
  misc_feature 1..639: note = Variant of 3'O-kinase
  source 1..639: mol_type = other DNA
atggcggttaccattggtttaacaggagggatcgcagcgggcaaatcgactgtgagtgccatgatgcgtgaactgggtctgccggtcatcgatgctgacgaggatgcacgcgccgttatgaagccaggcgaagaagcgtatcgcgacattgtagctgaattcgggccgggcatccttcgtgcggatggcgagatcgatcgcgggaaactgcgtgctatccgcttttcggacgaacaacaacgtaaggtgctgaattcgattgtaggtcctgcagtcctgaagaagatgctcgcggagtgggaagctcatatcgggtcaggcgccaagacggttgtgctggatatcccgctgctgttcgaatccggattgcaatcgtggatggacaaagttctcgtggtgtacgttgatgatgatgttcagttacgccgccttatggcacgtaacgggtttactgaagaagaagctctgatgcgcattcgttcacagtggcccagtgcggagaaagttaaacgtgcagacgctgtcatcgacaataatggcaatattgaagatacccgccgccagctgctggacattttacaccagtgggatctgctggacaaaggtggctccggccaccatcatcaccatcactaatga

SEQ ID NO: 5006 - protein, 211 aa, synthetic construct
  REGION 1..211: note = Variant of 3'O-kinase
MAVTIGLTGGIAAGKSTVSAMMRELGLPVIDADEDARAVMKPGEEAYRDIVAEFGPGILRADGEIDRGKLRAIRFSDEQQRKVLNSIVGPAVLKKMLAEWEAHIGSGAKTVVLDIPLLFESGLQSWMDKVLVVYVDDDVQLRRLMARNGFTEEEALMRIRSQWPSAEKVKRADAVIDNNGNIEDTRRQLLDILHQWDLLDKGGSGHHHHHH

SEQ ID NO: 5007 - DNA, 639 bp, synthetic construct
  misc_feature 1..639: note = Variant of 3'O-kinase
  source 1..639: mol_type = other DNA
atggcggttaccattggtttaacaggagggatcgcagcgggcaaatcgactgtgagttcgatgatgcgtgaactgggtctgccggtcatcgatgctgacgaggcagcacgcgccgttatgaagccaggcgaagaagcgtatcgcgacattgtagctgaattcgggccgggcatccttcgtgcggatggcgagatcgatcgcgggaaactgcgtgctatccgcttttcggacgaacaacaacgtaaggtgctgaattcgattgtaggtcctgcagtcctgaagaagatgctcgcggagtgggaagctcatatcgggtcaggcgccaagacggttgtgctggatatcccgctgctgttcgaatccggattgcaatcgtggatggacaaagttctcgtggtgtacgttgatgatgatgttcagttacgccgccttatggcacgtaacgggtttactgaagaagaagctctgatgcgcattcgttcacagtggcccagtgcggagaaagttaaacgtgcagacgctgtcatcgacaataatggcaatattgaagatacccgccgccagctgctggacattttacaccagtgggatctgctggacaaaggtggctccggccaccatcatcaccatcactaatga

SEQ ID NO: 5008 - protein, 211 aa, synthetic construct
  REGION 1..211: note = Variant of 3'O-kinase
MAVTIGLTGGIAAGKSTVSSMMRELGLPVIDADEAARAVMKPGEEAYRDIVAEFGPGILRADGEIDRGKLRAIRFSDEQQRKVLNSIVGPAVLKKMLAEWEAHIGSGAKTVVLDIPLLFESGLQSWMDKVLVVYVDDDVQLRRLMARNGFTEEEALMRIRSQWPSAEKVKRADAVIDNNGNIEDTRRQLLDILHQWDLLDKGGSGHHHHHH

SEQ ID NO: 5009 - DNA, 639 bp, synthetic construct
  misc_feature 1..639: note = Variant of 3'O-kinase
  source 1..639: mol_type = other DNA
atggcggttaccattggtttaacaggagggatcgcagcgggcaaatcgactgtgagtattatgatgcgtgaactgggtctgccggtcatcgatgctgacgaggcagcacgcgccgttatgaagccaggcgaagaagcgtatcgcgacattgtagctgaattcgggccgggcatccttcgtgcggatggcgagatcgatcgcgggaaactgcgtgctatccgcttttcggacgaacaacaacgtaaggtgctgaattcgattgtaggtcctgcagtcctgaagaagatgctcgcggagtgggaagctcatatcgggtcaggcgccaagacggttgtgctggatatcccgctgctgttcgaatccggattgcaatcgtggatggacaaagttctcgtggtgtacgttgatgatgatgttcagttacgccgccttatggcacgtaacgggtttactgaagaagaagctctgatgcgcattcgttcacagtggcccagtgcggagaaagttaaacgtgcagacgctgtcatcgacaataatggcaatattgaagatacccgccgccagctgctggacattttacaccagtgggatctgctggacaaaggtggctccggccaccatcatcaccatcactaatga

SEQ ID NO: 5010 - protein, 211 aa, synthetic construct
  REGION 1..211: note = Variant of 3'O-kinase
MAVTIGLTGGIAAGKSTVSIMMRELGLPVIDADEAARAVMKPGEEAYRDIVAEFGPGILRADGEIDRGKLRAIRFSDEQQRKVLNSIVGPAVLKKMLAEWEAHIGSGAKTVVLDIPLLFESGLQSWMDKVLVVYVDDDVQLRRLMARNGFTEEEALMRIRSQWPSAEKVKRADAVIDNNGNIEDTRRQLLDILHQWDLLDKGGSGHHHHHH

SEQ ID NO: 5011 - DNA, 639 bp, synthetic construct
  misc_feature 1..639: note = Variant of 3'O-kinase
  source 1..639: mol_type = other DNA
atggcggttaccattggtttaacaggagggatcgcagcgggcaaatcgactgtgagtaagatgatgcgtgaactgggtctgccggtcatcgatgctgacgaggcagcacgcgccgttatgaagccaggcgaagaagcgtatcgcgacattgtagctgaattcgggccgggcatccttcgtgcggatggcgagatcgatcgcgggaaactgcgtgctatccgcttttcggacgaacaacaacgtaaggtgctgaattcgattgtaggtcctgcagtcctgaagaagatgctcgcggagtgggaagctcatatcgggtcaggcgccaagacggttgtgctggatatcccgctgctgttcgaatccggattgcaatcgtggatggacaaagttctcgtggtgtacgttgatgatgatgttcagttacgccgccttatggcacgtaacgggtttactgaagaagaagctctgatgcgcattcgttcacagtggcccagtgcggagaaagttaaacgtgcagacgctgtcatcgacaataatggcaatattgaagatacccgccgccagctgctggacattttacaccagtgggatctgctggacaaaggtggctccggccaccatcatcaccatcactaatga

SEQ ID NO: 5012 - protein, 211 aa, synthetic construct
  REGION 1..211: note = Variant of 3'O-kinase
MAVTIGLTGGIAAGKSTVSKMMRELGLPVIDADEAARAVMKPGEEAYRDIVAEFGPGILRADGEIDRGKLRAIRFSDEQQRKVLNSIVGPAVLKKMLAEWEAHIGSGAKTVVLDIPLLFESGLQSWMDKVLVVYVDDDVQLRRLMARNGFTEEEALMRIRSQWPSAEKVKRADAVIDNNGNIEDTRRQLLDILHQWDLLDKGGSGHHHHHH

SEQ ID NO: 5013 - DNA, 639 bp, synthetic construct
  misc_feature 1..639: note = Variant of 3'O-kinase
  source 1..639: mol_type = other DNA
atggcggttaccattggtttaacaggagggatcgcagcgggcaaatcgactgtgagtgccatgatgcgtgaactgggtctgccggtcatcgatgctgacgaggcatctcgcgccgttatgaagccaggcgaagaagcgtatcgcgacattgtagctgaattcgggccgggcatccttcgtgcggatggcgagatcgatcgcgggaaactgcgtgctatccgcttttcggacgaacaacaacgtaaggtgctgaattcgattgtaggtcctgcagtcctgaagaagatgctcgcggagtgggaagctcatatcgggtcaggcgccaagacggttgtgctggatatcccgctgctgttcgaatccggattgcaatcgtggatggacaaagttctcgtggtgtacgttgatgatgatgttcagttacgccgccttatggcacgtaacgggtttactgaagaagaagctctgatgcgcattcgttcacagtggcccagtgcggagaaagttaaacgtgcagacgctgtcatcgacaataatggcaatattgaagatacccgccgccagctgctggacattttacaccagtgggatctgctggacaaaggtggctccggccaccatcatcaccatcactaatga

SEQ ID NO: 5014 - protein, 211 aa, synthetic construct
  REGION 1..211: note = Variant of 3'O-kinase
MAVTIGLTGGIAAGKSTVSAMMRELGLPVIDADEASRAVMKPGEEAYRDIVAEFGPGILRADGEIDRGKLRAIRFSDEQQRKVLNSIVGPAVLKKMLAEWEAHIGSGAKTVVLDIPLLFESGLQSWMDKVLVVYVDDDVQLRRLMARNGFTEEEALMRIRSQWPSAEKVKRADAVIDNNGNIEDTRRQLLDILHQWDLLDKGGSGHHHHHH

SEQ ID NO: 5015 - DNA, 639 bp, synthetic construct
  misc_feature 1..639: note = Variant of 3'O-kinase
  source 1..639: mol_type = other DNA
atggcggttaccattggtttaacaggagggatcgcagcgggcaaatcgactgtgagtgccatgatgcgtgaactgggtctgccggtcatcgatgctgacgaggcagcacgcgccgttatgaagccaggcgaagaagcgtatcgcgacattgtagctgaattcgggccgggcatccttcgtgcggatggcgagatcgatcgcgggaaactgcgtgctatccgcttttcggacgaacaacaacgtaaggtgctggagtcgattgtaggtcctgcagtcctgaagaagatgctcgcggagtgggaagctcatatcgggtcaggcgccaagacggttgtgctggatatcccgctgctgttcgaatccggattgcaatcgtggatggacaaagttctcgtggtgtacgttgatgatgatgttcagttacgccgccttatggcacgtaacgggtttactgaagaagaagctctgatgcgcattcgttcacagtggcccagtgcggagaaagttaaacgtgcagacgctgtcatcgacaataatggcaatattgaagatacccgccgccagctgctggacattttacaccagtgggatctgctggacaaaggtggctccggccaccatcatcaccatcactaatga

SEQ ID NO: 5016 - protein, 211 aa, synthetic construct
  REGION 1..211: note = Variant of 3'O-kinase
MAVTIGLTGGIAAGKSTVSAMMRELGLPVIDADEAARAVMKPGEEAYRDIVAEFGPGILRADGEIDRGKLRAIRFSDEQQRKVLESIVGPAVLKKMLAEWEAHIGSGAKTVVLDIPLLFESGLQSWMDKVLVVYVDDDVQLRRLMARNGFTEEEALMRIRSQWPSAEKVKRADAVIDNNGNIEDTRRQLLDILHQWDLLDKGGSGHHHHHH

SEQ ID NO: 5017 - DNA, 639 bp, synthetic construct
  misc_feature 1..639: note = Variant of 3'O-kinase
  source 1..639: mol_type = other DNA
atggcggttaccattggtttaacaggagggatcgcagcgggcaaatcgactgtgagtgccatgatgcgtgaactgggtctgccggtcggtgatgctgacgaggcagcacgcgccgttatgaagccaggcgaagaagcgtatcgcgacattgtagctgaattcgggccgggcatccttcgtgcggatggcgagatcgatcgcgggaaactgcgtgctatccgcttttcggacgaacaacaacgtaaggtgctgaattcgattgtaggtcctgcagtcctgaagaagatgctcgcggagtgggaagctcatatcgggtcaggcgccaagacggttgtgctggatatcccgctgctgttcgaatccggattgcaatcgtggatggacaaagttctcgtggtgtacgttgatgatgatgttcagttacgccgccttatggcacgtaacgggtttactgaagaagaagctctgatgcgcattcgttcacagtggcccagtgcggagaaagttaaacgtgcagacgctgtcatcgacaataatggcaatattgaagatacccgccgccagctgctggacattttacaccagtgggatctgctggacaaaggtggctccggccaccatcatcaccatcactaatga

SEQ ID NO: 5018 - protein, 211 aa, synthetic construct
  REGION 1..211: note = Variant of 3'O-kinase
MAVTIGLTGGIAAGKSTVSAMMRELGLPVGDADEAARAVMKPGEEAYRDIVAEFGPGILRADGEIDRGKLRAIRFSDEQQRKVLNSIVGPAVLKKMLAEWEAHIGSGAKTVVLDIPLLFESGLQSWMDKVLVVYVDDDVQLRRLMARNGFTEEEALMRIRSQWPSAEKVKRADAVIDNNGNIEDTRRQLLDILHQWDLLDKGGSGHHHHHH

SEQ ID NO: 5019 - DNA, 639 bp, synthetic construct
  misc_feature 1..639: note = Variant of 3'O-kinase
  source 1..639: mol_type = other DNA
atggcggttaccattggtttaacaggagggatcgcagcgggcaaatcgactgtgagtgccatgatggcggaactgggtctgccggtcatcgatgctgacgaggcagcacgcgccgttatgaagccaggcgaagaagcgtatcgcgacattgtagctgaattcgggccgggcatccttcgtgcggatggcgagatcgatcgcgggaaactgcgtgctatccgcttttcggacgaacaacaacgtaaggtgctgaattcgattgtaggtcctgcagtcctgaagaagatgctcgcggagtgggaagctcatatcgggtcaggcgccaagacggttgtgctggatatcccgctgctgttcgaatccggattgcaatcgtggatggacaaagttctcgtggtgtacgttgatgatgatgttcagttacgccgccttatggcacgtaacgggtttactgaagaagaagctctgatgcgcattcgttcacagtggcccagtgcggagaaagttaaacgtgcagacgctgtcatcgacaataatggcaatattgaagatacccgccgccagctgctggacattttacaccagtgggatctgctggacaaaggtggctccggccaccatcatcaccatcactaatga

SEQ ID NO: 5020 - protein, 211 aa, synthetic construct
  REGION 1..211: note = Variant of 3'O-kinase
MAVTIGLTGGIAAGKSTVSAMMAELGLPVIDADEAARAVMKPGEEAYRDIVAEFGPGILRADGEIDRGKLRAIRFSDEQQRKVLNSIVGPAVLKKMLAEWEAHIGSGAKTVVLDIPLLFESGLQSWMDKVLVVYVDDDVQLRRLMARNGFTEEEALMRIRSQWPSAEKVKRADAVIDNNGNIEDTRRQLLDILHQWDLLDKGGSGHHHHHH

SEQ ID NO: 5021 - DNA, 639 bp, synthetic construct
  misc_feature 1..639: note = Variant of 3'O-kinase
  source 1..639: mol_type = other DNA
atggcggttaccattggtttaacaggagggatcgcagcgggcaaatcgactgtgagtcagatgatgcgtgaactgggtctgccggtcatcgatgctgacgaggcagcacgcgccgttatgaagccaggcgaagaagcgtatcgcgacattgtagctgaattcgggccgggcatccttcgtgcggatggcgagatcgatcgcgggaaactgcgtgctatccgcttttcggacgaacaacaacgtaaggtgctgaattcgattgtaggtcctgcagtcctgaagaagatgctcgcggagtgggaagctcatatcgggtcaggcgccaagacggttgtgctggatatcccgctgctgttcgaatccggattgcaatcgtggatggacaaagttctcgtggtgtacgttgatgatgatgttcagttacgccgccttatggcacgtaacgggtttactgaagaagaagctctgatgcgcattcgttcacagtggcccagtgcggagaaagttaaacgtgcagacgctgtcatcgacaataatggcaatattgaagatacccgccgccagctgctggacattttacaccagtgggatctgctggacaaaggtggctccggccaccatcatcaccatcactaatga

SEQ ID NO: 5022 - protein, 211 aa, synthetic construct
  REGION 1..211: note = Variant of 3'O-kinase
MAVTIGLTGGIAAGKSTVSQMMRELGLPVIDADEAARAVMKPGEEAYRDIVAEFGPGILRADGEIDRGKLRAIRFSDEQQRKVLNSIVGPAVLKKMLAEWEAHIGSGAKTVVLDIPLLFESGLQSWMDKVLVVYVDDDVQLRRLMARNGFTEEEALMRIRSQWPSAEKVKRADAVIDNNGNIEDTRRQLLDILHQWDLLDKGGSGHHHHHH

SEQ ID NO: 5023 - DNA, 639 bp, synthetic construct
  misc_feature 1..639: note = Variant of 3'O-kinase
  source 1..639: mol_type = other DNA
atggcggttaccattggtttaacaggagggatcgcagcgggcaaatcgactgtgagtgccatgatgcgtgaactgggtctgccggtcatcgatgctgacgaggcagcacgcgccgttatgaagccaggcgaagaagcgtatcgcgacattgtagctgaattcgggccgggcatccttcgtgcggatggcgagatcgatcgcgggaaactgcgtgctatccgcttttcggacgaacaacaacgtaaggtgctgaattcgattgtaacgcctgcagtcctgaagaagatgctcgcggagtgggaagctcatatcgggtcaggcgccaagacggttgtgctggatatcccgctgctgttcgaatccggattgcaatcgtggatggacaaagttctcgtggtgtacgttgatgatgatgttcagttacgccgccttatggcacgtaacgggtttactgaagaagaagctctgatgcgcattcgttcacagtggcccagtgcggagaaagttaaacgtgcagacgctgtcatcgacaataatggcaatattgaagatacccgccgccagctgctggacattttacaccagtgggatctgctggacaaaggtggctccggccaccatcatcaccatcactaatga

SEQ ID NO: 5024 - protein, 211 aa, synthetic construct
  REGION 1..211: note = Variant of 3'O-kinase
MAVTIGLTGGIAAGKSTVSAMMRELGLPVIDADEAARAVMKPGEEAYRDIVAEFGPGILRADGEIDRGKLRAIRFSDEQQRKVLNSIVTPAVLKKMLAEWEAHIGSGAKTVVLDIPLLFESGLQSWMDKVLVVYVDDDVQLRRLMARNGFTEEEALMRIRSQWPSAEKVKRADAVIDNNGNIEDTRRQLLDILHQWDLLDKGGSGHHHHHH

SEQ ID NO: 5025 - DNA, 639 bp, synthetic construct
  misc_feature 1..639: note = Variant of 3'O-kinase
  source 1..639: mol_type = other DNA
atggcggttaccattggtttaacaggagggatcgcagcgggcaaatcgactgcgagtgccatgatgcgtgaactgggtctgccggtcatcgatgctgacgaggcagcacgcgccgttatgaagccaggcgaagaagcgtatcgcgacattgtagctgaattcgggccgggcatccttcgtgcggatggcgagatcgatcgcgggaaactgcgtgctatccgcttttcggacgaacaacaacgtaaggtgctgaattcgattgtaggtcctgcagtcctgaagaagatgctcgcggagtgggaagctcatatcgggtcaggcgccaagacggttgtgctggatatcccgctgctgttcgaatccggattgcaatcgtggatggacaaagttctcgtggtgtacgttgatgatgatgttcagttacgccgccttatggcacgtaacgggtttactgaagaagaagctctgatgcgcattcgttcacagtggcccagtgcggagaaagttaaacgtgcagacgctgtcatcgacaataatggcaatattgaagatacccgccgccagctgctggacattttacaccagtgggatctgctggacaaaggtggctccggccaccatcatcaccatcactaatga

SEQ ID NO: 5026 - protein, 211 aa, synthetic construct
  REGION 1..211: note = Variant of 3'O-kinase
MAVTIGLTGGIAAGKSTASAMMRELGLPVIDADEAARAVMKPGEEAYRDIVAEFGPGILRADGEIDRGKLRAIRFSDEQQRKVLNSIVGPAVLKKMLAEWEAHIGSGAKTVVLDIPLLFESGLQSWMDKVLVVYVDDDVQLRRLMARNGFTEEEALMRIRSQWPSAEKVKRADAVIDNNGNIEDTRRQLLDILHQWDLLDKGGSGHHHHHH

SEQ ID NO: 5027 - DNA, 639 bp, synthetic construct
  misc_feature 1..639: note = Variant of 3'O-kinase
  source 1..639: mol_type = other DNA
atggcggttaccattggtttaacaggagggatcgcagcgggcaaatcgactgtgagtgccatgatgcgtgaactgggtctgccgattatcgatgctgacgaggcagcacgcgccgttatgaagccaggcgaagaagcgtatcgcgacattgtagctgaattcgggccgggcatccttcgtgcggatggcgagatcgatcgcgggaaactgcgtgctatccgcttttcggacgaacaacaacgtaaggtgctgaattcgattgtaggtcctgcagtcctgaagaagatgctcgcggagtgggaagctcatatcgggtcaggcgccaagacggttgtgctggatatcccgctgctgttcgaatccggattgcaatcgtggatggacaaagttctcgtggtgtacgttgatgatgatgttcagttacgccgccttatggcacgtaacgggtttactgaagaagaagctctgatgcgcattcgttcacagtggcccagtgcggagaaagttaaacgtgcagacgctgtcatcgacaataatggcaatattgaagatacccgccgccagctgctggacattttacaccagtgggatctgctggacaaaggtggctccggccaccatcatcaccatcactaatga

SEQ ID NO: 5028 - protein, 211 aa, synthetic construct
  REGION 1..211: note = Variant of 3'O-kinase
MAVTIGLTGGIAAGKSTVSAMMRELGLPIIDADEAARAVMKPGEEAYRDIVAEFGPGILRADGEIDRGKLRAIRFSDEQQRKVLNSIVGPAVLKKMLAEWEAHIGSGAKTVVLDIPLLFESGLQSWMDKVLVVYVDDDVQLRRLMARNGFTEEEALMRIRSQWPSAEKVKRADAVIDNNGNIEDTRRQLLDILHQWDLLDKGGSGHHHHHH

SEQ ID NO: 5029 - DNA, 639 bp, synthetic construct
  misc_feature 1..639: note = Variant of 3'O-kinase
  source 1..639: mol_type = other DNA
atggcggttaccattggtttaacaggagggatcgcagcgggcaaatcgactgtgagtgccatgatgcgtgaactgggtctgccggtcatcgatgctgacgaggcagcacgcgccgttatgaagccaggcgaagaagcgtatcgcgacattgtagctgaattcgggccgggcatccttcgtgcggatggcgagatcgatcgcgggaaactgcgtgctatccgcttttcggacgaacaacaacgtaaggtgctgaattcgattgtaggtcctgcagtcctgaagaagatgctcgcggagtgggaagctcatatcgggtcaggcgccaagacggttgtgctggatatcccgctgctgttcgaatccggattgcaatcgtggatggacaaagttctcgtggtgtacgttgatgatgatgttcagttatctcgccttatggcacgtaacgggtttactgaagaagaagctctgatgcgcattcgttcacagtggcccagtgcggagaaagttaaacgtgcagacgctgtcatcgacaataatggcaatattgaagatacccgccgccagctgctggacattttacaccagtgggatctgctggacaaaggtggctccggccaccatcatcaccatcactaatga

SEQ ID NO: 5030 - protein, 211 aa, synthetic construct
  REGION 1..211: note = Variant of 3'O-kinase
MAVTIGLTGGIAAGKSTVSAMMRELGLPVIDADEAARAVMKPGEEAYRDIVAEFGPGILRADGEIDRGKLRAIRFSDEQQRKVLNSIVGPAVLKKMLAEWEAHIGSGAKTVVLDIPLLFESGLQSWMDKVLVVYVDDDVQLSRLMARNGFTEEEALMRIRSQWPSAEKVKRADAVIDNNGNIEDTRRQLLDILHQWDLLDKGGSGHHHHHH

SEQ ID NO: 5031 - DNA, 639 bp, synthetic construct
  misc_feature 1..639: note = Variant of 3'O-kinase
  source 1..639: mol_type = other DNA
atggcggttaccattggtttaacaggagggatcgcagcgggcaaatcgactgtgagtgccatgatgcgtgaactgggtctgccggtcatcgatgctgacgaggcagcagtggccgttatgaagccaggcgaagaagcgtatcgcgacattgtagctgaattcgggccgggcatccttcgtgcggatggcgagatcgatcgcgggaaactgcgtgctatccgcttttcggacgaacaacaacgtaaggtgctgaattcgattgtaggtcctgcagtcctgaagaagatgctcgcggagtgggaagctcatatcgggtcaggcgccaagacggttgtgctggatatcccgctgctgttcgaatccggattgcaatcgtggatggacaaagttctcgtggtgtacgttgatgatgatgttcagttacgccgccttatggcacgtaacgggtttactgaagaagaagctctgatgcgcattcgttcacagtggcccagtgcggagaaagttaaacgtgcagacgctgtcatcgacaataatggcaatattgaagatacccgccgccagctgctggacattttacaccagtgggatctgctggacaaaggtggctccggccaccatcatcaccatcactaatga

SEQ ID NO: 5032 - protein, 211 aa, synthetic construct
  REGION 1..211: note = Variant of 3'O-kinase
MAVTIGLTGGIAAGKSTVSAMMRELGLPVIDADEAAVAVMKPGEEAYRDIVAEFGPGILRADGEIDRGKLRAIRFSDEQQRKVLNSIVGPAVLKKMLAEWEAHIGSGAKTVVLDIPLLFESGLQSWMDKVLVVYVDDDVQLRRLMARNGFTEEEALMRIRSQWPSAEKVKRADAVIDNNGNIEDTRRQLLDILHQWDLLDKGGSGHHHHHH

SEQ ID NO: 5033 - DNA, 639 bp, synthetic construct
  misc_feature 1..639: note = Variant of 3'O-kinase
  source 1..639: mol_type = other DNA
atggcggttaccattggtttaacaggagggatcgcagcgggcaaatcgactgtgagtgccatgatgcgtgaactgggtctgccggtcatcgatgctgacgaggcagcacgcgccgttcttaagccaggcgaagaagcgtatcgcgacattgtagctgaattcgggccgggcatccttcgtgcggatggcgagatcgatcgcgggaaactgcgtgctatccgcttttcggacgaacaacaacgtaaggtgctgaattcgattgtaggtcctgcagtcctgaagaagatgctcgcggagtgggaagctcatatcgggtcaggcgccaagacggttgtgctggatatcccgctgctgttcgaatccggattgcaatcgtggatggacaaagttctcgtggtgtacgttgatgatgatgttcagttacgccgccttatggcacgtaacgggtttactgaagaagaagctctgatgcgcattcgttcacagtggcccagtgcggagaaagttaaacgtgcagacgctgtcatcgacaataatggcaatattgaagatacccgccgccagctgctggacattttacaccagtgggatctgctggacaaaggtggctccggccaccatcatcaccatcactaatga

SEQ ID NO: 5034 - protein, 211 aa, synthetic construct
  REGION 1..211: note = Variant of 3'O-kinase
MAVTIGLTGGIAAGKSTVSAMMRELGLPVIDADEAARAVLKPGEEAYRDIVAEFGPGILRADGEIDRGKLRAIRFSDEQQRKVLNSIVGPAVLKKMLAEWEAHIGSGAKTVVLDIPLLFESGLQSWMDKVLVVYVDDDVQLRRLMARNGFTEEEALMRIRSQWPSAEKVKRADAVIDNNGNIEDTRRQLLDILHQWDLLDKGGSGHHHHHH

SEQ ID NO: 5035 - DNA, 639 bp, synthetic construct
  misc_feature 1..639: note = Variant of 3'O-kinase
  source 1..639: mol_type = other DNA
atggcggttaccattggtttaacaggagggatcgcagcgggcaaatcgactgtgagtgccatgatgcgtgaactgggtctgccggtcatcgatgctgacgaggcagcacgcgccgttatgaagccaggcgaagaagcgtatcgcgacattgtagctgaattcgggccgggcatccttcgtgcggatggcgagatcgatcgcgggaaactgcgtgctatccgcttttcggacgaacaacaacgtaaggtgctgaattcgattgtaggtcctgcagtcctgaagaagatgctcgcggagtgggaagctcatatcgggtcaggcgccaagacggttgtgctggatatcccgctgctgttcgaatccggattgcaatcgtggatggacaaagttctcgtggtgtacgttgatgatgatgttcagttacgccgccttatgcagcgtaacgggtttactgaagaagaagctctgatgcgcattcgttcacagtggcccagtgcggagaaagttaaacgtgcagacgctgtcatcgacaataatggcaatattgaagatacccgccgccagctgctggacattttacaccagtgggatctgctggacaaaggtggctccggccaccatcatcaccatcactaatga

SEQ ID NO: 5036 - protein, 211 aa, synthetic construct
  REGION 1..211: note = Variant of 3'O-kinase
MAVTIGLTGGIAAGKSTVSAMMRELGLPVIDADEAARAVMKPGEEAYRDIVAEFGPGILRADGEIDRGKLRAIRFSDEQQRKVLNSIVGPAVLKKMLAEWEAHIGSGAKTVVLDIPLLFESGLQSWMDKVLVVYVDDDVQLRRLMQRNGFTEEEALMRIRSQWPSAEKVKRADAVIDNNGNIEDTRRQLLDILHQWDLLDKGGSGHHHHHH

SEQ ID NO: 5037 - DNA, 639 bp, synthetic construct
  misc_feature 1..639: note = Variant of 3'O-kinase
  source 1..639: mol_type = other DNA
atggcggttaccattggtttaacaggagggatcgcagcgggcaaatcgactgtgagtgccatgatgcgtgaactgggtctgccggtcatcgatgctgacgaggcagcacgcgccgttatgaagccaggcgaagaagcgtatcgcgacattgtagctgaattcgggccgggcatccttcgtgcggatggcgagatcgatcgcgggaaactgcgtgctatccgcttttcggacgaacaacaacgtaaggtgctgaattcgattgtaggtcctgcagtcctgaagaagatgctcgcggagtgggaagctcatatcgggtcaggcgccaagacggttgtgctggatatcccgctgctgttcgaatccggattgcaatcgtggatggacaaagttctcgtggtgtacgttgatgatgatgttcagttagcgcgccttatggcacgtaacgggtttactgaagaagaagctctgatgcgcattcgttcacagtggcccagtgcggagaaagttaaacgtgcagacgctgtcatcgacaataatggcaatattgaagatacccgccgccagctgctggacattttacaccagtgggatctgctggacaaaggtggctccggccaccatcatcaccatcactaatga

SEQ ID NO: 5038 - protein, 211 aa, synthetic construct
  REGION 1..211: note = Variant of 3'O-kinase
MAVTIGLTGGIAAGKSTVSAMMRELGLPVIDADEAARAVMKPGEEAYRDIVAEFGPGILRADGEIDRGKLRAIRFSDEQQRKVLNSIVGPAVLKKMLAEWEAHIGSGAKTVVLDIPLLFESGLQSWMDKVLVVYVDDDVQLARLMARNGFTEEEALMRIRSQWPSAEKVKRADAVIDNNGNIEDTRRQLLDILHQWDLLDKGGSGHHHHHH

SEQ ID NO: 5039 - DNA, 639 bp, synthetic construct
  misc_feature 1..639: note = Variant of 3'O-kinase
  source 1..639: mol_type = other DNA
atggcggttaccattggtttaacaggagggatcgcagcgggcaaatcgactgtgagtgccatgatgcgtgaactgggtctgccggtcatcgatgctgacgaggcagcacgcattgttatgaagccaggcgaagaagcgtatcgcgacattgtagctgaattcgggccgggcatccttcgtgcggatggcgagatcgatcgcgggaaactgcgtgctatccgcttttcggacgaacaacaacgtaaggtgctgaattcgattgtaggtcctgcagtcctgaagaagatgctcgcggagtgggaagctcatatcgggtcaggcgccaagacggttgtgctggatatcccgctgctgttcgaatccggattgcaatcgtggatggacaaagttctcgtggtgtacgttgatgatgatgttcagttacgccgccttatggcacgtaacgggtttactgaagaagaagctctgatgcgcattcgttcacagtggcccagtgcggagaaagttaaacgtgcagacgctgtcatcgacaataatggcaatattgaagatacccgccgccagctgctggacattttacaccagtgggatctgctggacaaaggtggctccggccaccatcatcaccatcactaatga

SEQ ID NO: 5040 - protein, 211 aa, synthetic construct
  REGION 1..211: note = Variant of 3'O-kinase
MAVTIGLTGGIAAGKSTVSAMMRELGLPVIDADEAARIVMKPGEEAYRDIVAEFGPGILRADGEIDRGKLRAIRFSDEQQRKVLNSIVGPAVLKKMLAEWEAHIGSGAKTVVLDIPLLFESGLQSWMDKVLVVYVDDDVQLRRLMARNGFTEEEALMRIRSQWPSAEKVKRADAVIDNNGNIEDTRRQLLDILHQWDLLDKGGSGHHHHHH

SEQ ID NO: 5041 - DNA, 639 bp, synthetic construct
  misc_feature 1..639: note = Variant of 3'O-kinase
  source 1..639: mol_type = other DNA
atggcggttaccattggtttaacaggagggatcgcagcgggcaaatcgactgtgagtgccatgatgcgtgaactgggtctgccggtcatcgatgctgacgaggcagcacgcgccgttatgaagccaggcgaagaagcgtatcgcgacattgtagctgaattcgggccgggcatccttcgtgcggatggcgagatcgatcgcgggaaactgcgtgctatccgcttttcggacgaacaacaacgtaaggtgctgaattcgattgtaggtcctgcagtcctgaagaagatgctcgcggagtgggaagctcatatcgggtcaggcgccaagacggttgtgctggatatcccgctgctgttcgaatccggattgcaatcgtggatggacaaagttctcgtgaggtacgttgatgatgatgttcagttacgccgccttatggcacgtaacgggtttactgaagaagaagctctgatgcgcattcgttcacagtggcccagtgcggagaaagttaaacgtgcagacgctgtcatcgacaataatggcaatattgaagatacccgccgccagctgctggacattttacaccagtgggatctgctggacaaaggtggctccggccaccatcatcaccatcactaatga

SEQ ID NO: 5042 - protein, 211 aa, synthetic construct
  REGION 1..211: note = Variant of 3'O-kinase
MAVTIGLTGGIAAGKSTVSAMMRELGLPVIDADEAARAVMKPGEEAYRDIVAEFGPGILRADGEIDRGKLRAIRFSDEQQRKVLNSIVGPAVLKKMLAEWEAHIGSGAKTVVLDIPLLFESGLQSWMDKVLVRYVDDDVQLRRLMARNGFTEEEALMRIRSQWPSAEKVKRADAVIDNNGNIEDTRRQLLDILHQWDLLDKGGSGHHHHHH

SEQ ID NO: 5043 - DNA, 639 bp, synthetic construct
  misc_feature 1..639: note = Variant of 3'O-kinase
  source 1..639: mol_type = other DNA
atggcggttaccattggtttacggggagggatcgcagcgggcaaatcgactgtgagtgccatgatgcgtgaactgggtctgccggtcatcgatgctgacgaggcagcacgcgccgttatgaagccaggcgaagaagcgtatcgcgacattgtagctgaattcgggccgggcatccttcgtgcggatggcgagatcgatcgcgggaaactgcgtgctatccgcttttcggacgaacaacaacgtaaggtgctgaattcgattgtaggtcctgcagtcctgaagaagatgctcgcggagtgggaagctcatatcgggtcaggcgccaagacggttgtgctggatatcccgctgctgttcgaatccggattgcaatcgtggatggacaaagttctcgtggtgtacgttgatgatgatgttcagttacgccgccttatggcacgtaacgggtttactgaagaagaagctctgatgcgcattcgttcacagtggcccagtgcggagaaagttaaacgtgcagacgctgtcatcgacaataatggcaatattgaagatacccgccgccagctgctggacattttacaccagtgggatctgctggacaaaggtggctccggccaccatcatcaccatcactaatga

SEQ ID NO: 5044 - protein, 211 aa, synthetic construct
  REGION 1..211: note = Variant of 3'O-kinase
MAVTIGLRGGIAAGKSTVSAMMRELGLPVIDADEAARAVMKPGEEAYRDIVAEFGPGILRADGEIDRGKLRAIRFSDEQQRKVLNSIVGPAVLKKMLAEWEAHIGSGAKTVVLDIPLLFESGLQSWMDKVLVVYVDDDVQLRRLMARNGFTEEEALMRIRSQWPSAEKVKRADAVIDNNGNIEDTRRQLLDILHQWDLLDKGGSGHHHHHH

SEQ ID NO: 5045 - DNA, 639 bp, synthetic construct
  misc_feature 1..639: note = Variant of 3'O-kinase
  source 1..639: mol_type = other DNA
atggcggttaccattggtttaacaggagggatcgcagcgggcaaatcgactgtgagtgccatgatgcgtgaactgggtctgccggtcatcgatgctgacgaggcagcacgcgccgttatgaagccaggcgaagaagcgtatcgcgacattgtagctgaattcgggccgggcatccttcgtgcggatggcgagatcgatcgcgggaaactgcgtgctatccgcttttcggacgaacaacaacgtaaggtgctgaattcgatttggggtcctgcagtcctgaagaagatgctcgcggagtgggaagctcatatcgggtcaggcgccaagacggttgtgctggatatcccgctgctgttcgaatccggattgcaatcgtggatggacaaagttctcgtggtgtacgttgatgatgatgttcagttacgccgccttatggcacgtaacgggtttactgaagaagaagctctgatgcgcattcgttcacagtggcccagtgcggagaaagttaaacgtgcagacgctgtcatcgacaataatggcaatattgaagatacccgccgccagctgctggacattttacaccagtgggatctgctggacaaaggtggctccggccaccatcatcaccatcactaatga

SEQ ID NO: 5046 - protein, 211 aa, synthetic construct
  REGION 1..211: note = Variant of 3'O-kinase
MAVTIGLTGGIAAGKSTVSAMMRELGLPVIDADEAARAVMKPGEEAYRDIVAEFGPGILRADGEIDRGKLRAIRFSDEQQRKVLNSIWGPAVLKKMLAEWEAHIGSGAKTVVLDIPLLFESGLQSWMDKVLVVYVDDDVQLRRLMARNGFTEEEALMRIRSQWPSAEKVKRADAVIDNNGNIEDTRRQLLDILHQWDLLDKGGSGHHHHHH

SEQ ID NO: 5047 - DNA, 639 bp, synthetic construct
  misc_feature 1..639: note = Variant of 3'O-kinase
  source 1..639: mol_type = other DNA
atggcggttaccattggtttaacaggagggatcgcagcgggcaaatcgactgtgagtgccatgatgcgtgaactgggtctgccggtcatcgatgctgacgaggcagcacgcgccgttatgaagccaggcgaagaagcgtatcgcgacattgtagctgaattcgggccgggcatccttcgtgcggatggcgagatcgatcgcgggaaactgcgtgctatccgcttttcggacgaacaacaacgtaaggtgctgaattcgattgtaggtcctgcagtcctgaagaagatgctcgcggagtgggaagctcatatcgggtcaggcgccaagacggttgtgctggatatcccgctgctgttcgaatccggattgcaatcgtggatggacaaagttctcgtggtgtacgttgatgatgatgttcagttacgccgccttatggcacgtaacgggtttactgaagaagaacctctgatgcgcattcgttcacagtggcccagtgcggagaaagttaaacgtgcagacgctgtcatcgacaataatggcaatattgaagatacccgccgccagctgctggacattttacaccagtgggatctgctggacaaaggtggctccggccaccatcatcaccatcactaatga

SEQ ID NO: 5048 - protein, 211 aa, synthetic construct
  REGION 1..211: note = Variant of 3'O-kinase
MAVTIGLTGGIAAGKSTVSAMMRELGLPVIDADEAARAVMKPGEEAYRDIVAEFGPGILRADGEIDRGKLRAIRFSDEQQRKVLNSIVGPAVLKKMLAEWEAHIGSGAKTVVLDIPLLFESGLQSWMDKVLVVYVDDDVQLRRLMARNGFTEEEPLMRIRSQWPSAEKVKRADAVIDNNGNIEDTRRQLLDILHQWDLLDKGGSGHHHHHH

SEQ ID NO: 5049 - DNA, 639 bp, synthetic construct
  misc_feature 1..639: note = Variant of 3'O-kinase
  source 1..639: mol_type = other DNA
atggcggttaccattggtttaacaggagggatcgcagcgggcaaatcgactgtgagtgccatgatgcgtgaactgggtctgccggtcatcgatgctgacgaggcagcacgcgccgttatgaagccaggcgaagaagcgtatcgcgacattgtagctgaattcgggccgggcatccttcgtgcggatggcgagatcgatcgcgggaaactgcgtgctatccgcttttcggacgaacaacaacgtaaggtgctgaattcgattgtaggtcctgcagtcctgaagaagatgctcgcggagtgggaagctcatatcgggtcaggcgccaagacggttgtgagggatatcccgctgctgttcgaatccggattgcaatcgtggatggacaaagttctcgtggtgtacgttgatgatgatgttcagttacgccgccttatggcacgtaacgggtttactgaagaagaagctctgatgcgcattcgttcacagtggcccagtgcggagaaagttaaacgtgcagacgctgtcatcgacaataatggcaatattgaagatacccgccgccagctgctggacattttacaccagtgggatctgctggacaaaggtggctccggccaccatcatcaccatcactaatga

SEQ ID NO: 5050 - protein, 211 aa, synthetic construct
  REGION 1..211: note = Variant of 3'O-kinase
MAVTIGLTGGIAAGKSTVSAMMRELGLPVIDADEAARAVMKPGEEAYRDIVAEFGPGILRADGEIDRGKLRAIRFSDEQQRKVLNSIVGPAVLKKMLAEWEAHIGSGAKTVVRDIPLLFESGLQSWMDKVLVVYVDDDVQLRRLMARNGFTEEEALMRIRSQWPSAEKVKRADAVIDNNGNIEDTRRQLLDILHQWDLLDKGGSGHHHHHH

SEQ ID NO: 5051 - DNA, 639 bp, synthetic construct
  misc_feature 1..639: note = Variant of 3'O-kinase
  source 1..639: mol_type = other DNA
atggcggttaccattggtttaacaggagggatcgcagcgggcaaatcgactgtgagtgccatgatgcgtgaactgggtctgccggtcatcgatgctgacgaggcagcacgcgccgttatgaagccaggcgaagaagcgtatcgcgacattgtagctgaattcgggccgggcatccttcgtgcggatggcgagatcgatcgcgggaaactgcgtgctatccgcttttcggacgaacaacaacgtaaggtgctgaattcgattgtaggtcctgcagtcctgaagaagatgctcgcggagtgggaagctcatatcgggtcaggcgccaagacggttgtgctggatatcccgctgctgttcgaatccggattgcaatcgtggatggacaaagttctcgtggtgtacgttgatgatgatgttcagttacgccgccttatggcacgtaacgggtttactgaagaagaagctctgatgcgcattcgtgtgcagtggcccagtgcggagaaagttaaacgtgcagacgctgtcatcgacaataatggcaatattgaagatacccgccgccagctgctggacattttacaccagtgggatctgctggacaaaggtggctccggccaccatcatcaccatcactaatga

SEQ ID NO: 5052 - protein, 211 aa, synthetic construct
  REGION 1..211: note = Variant of 3'O-kinase
MAVTIGLTGGIAAGKSTVSAMMRELGLPVIDADEAARAVMKPGEEAYRDIVAEFGPGILRADGEIDRGKLRAIRFSDEQQRKVLNSIVGPAVLKKMLAEWEAHIGSGAKTVVLDIPLLFESGLQSWMDKVLVVYVDDDVQLRRLMARNGFTEEEALMRIRVQWPSAEKVKRADAVIDNNGNIEDTRRQLLDILHQWDLLDKGGSGHHHHHH

SEQ ID NO: 5053 - DNA, 639 bp, synthetic construct
  misc_feature 1..639: note = Variant of 3'O-kinase
  source 1..639: mol_type = other DNA
atggcggttaccattggtttaacaggagggccggcagcgggcaaatcgactgtgagtgccatgatgcgtgaactgggtctgccggtcatcgatgctgacgaggcagcacgcgccgttatgaagccaggcgaagaagcgtatcgcgacattgtagctgaattcgggccgggcatccttcgtgcggatggcgagatcgatcgcgggaaactgcgtgctatccgcttttcggacgaacaacaacgtaaggtgctgaattcgattgtaggtcctgcagtcctgaagaagatgctcgcggagtgggaagctcatatcgggtcaggcgccaagacggttgtgctggatatcccgctgctgttcgaatccggattgcaatcgtggatggacaaagttctcgtggtgtacgttgatgatgatgttcagttacgccgccttatggcacgtaacgggtttactgaagaagaagctctgatgcgcattcgttcacagtggcccagtgcggagaaagttaaacgtgcagacgctgtcatcgacaataatggcaatattgaagatacccgccgccagctgctggacattttacaccagtgggatctgctggacaaaggtggctccggccaccatcatcaccatcactaatga

SEQ ID NO: 5054 - protein, 211 aa, synthetic construct
  REGION 1..211: note = Variant of 3'O-kinase
MAVTIGLTGGPAAGKSTVSAMMRELGLPVIDADEAARAVMKPGEEAYRDIVAEFGPGILRADGEIDRGKLRAIRFSDEQQRKVLNSIVGPAVLKKMLAEWEAHIGSGAKTVVLDIPLLFESGLQSWMDKVLVVYVDDDVQLRRLMARNGFTEEEALMRIRSQWPSAEKVKRADAVIDNNGNIEDTRRQLLDILHQWDLLDKGGSGHHHHHH

SEQ ID NO: 5055 - DNA, 639 bp, synthetic construct
  misc_feature 1..639: note = Variant of 3'O-kinase
  source 1..639: mol_type = other DNA
atggcggttaccattggtttaacaggagggatcgcagcgggcaaatcgactgtgagtgccatgatgcgtgaactgggtctgccggtcatcgatgctgacgaggcagcacgcgccgttatgaagccaggcgaagaagcgtatcgcgacattgtagctgaattcgggccgggcatccttcgtgcggatggcgagatcgatcgcgggaaactgcgtgctatccgcttttcggacgaacaacaacgtaaggtgctgaattcgattgtaggtcctgcagtcctgaagaagatgctcgcggagtgggaagctcatatcgggtcaggcgccaagacggttgtgctggatatcccgctgctgttcgaatccggattgcaatcgtggatggacaaagttctcgtggtgtacgttgatgatgatgttcagttacgcgttcttatggcacgtaacgggtttactgaagaagaagctctgatgcgcattcgttcacagtggcccagtgcggagaaagttaaacgtgcagacgctgtcatcgacaataatggcaatattgaagatacccgccgccagctgctggacattttacaccagtgggatctgctggacaaaggtggctccggccaccatcatcaccatcactaatga

SEQ ID NO: 5056 - protein, 211 aa, synthetic construct
  REGION 1..211: note = Variant of 3'O-kinase
MAVTIGLTGGIAAGKSTVSAMMRELGLPVIDADEAARAVMKPGEEAYRDIVAEFGPGILRADGEIDRGKLRAIRFSDEQQRKVLNSIVGPAVLKKMLAEWEAHIGSGAKTVVLDIPLLFESGLQSWMDKVLVVYVDDDVQLRVLMARNGFTEEEALMRIRSQWPSAEKVKRADAVIDNNGNIEDTRRQLLDILHQWDLLDKGGSGHHHHHH

SEQ ID NO: 5057 - DNA, 639 bp, synthetic construct
  misc_feature 1..639: note = Variant of 3'O-kinase
  source 1..639: mol_type = other DNA
atggcggttaccattggtttaacaggagggatcgcagcgggctattcgactgtgagtgccatgatgcgtgaactgggtctgccggtcatcgatgctgacgaggcagcacgcgccgttatgaagccaggcgaagaagcgtatcgcgacattgtagctgaattcgggccgggcatccttcgtgcggatggcgagatcgatcgcgggaaactgcgtgctatccgcttttcggacgaacaacaacgtaaggtgctgaattcgattgtaggtcctgcagtcctgaagaagatgctcgcggagtgggaagctcatatcgggtcaggcgccaagacggttgtgctggatatcccgctgctgttcgaatccggattgcaatcgtggatggacaaagttctcgtggtgtacgttgatgatgatgttcagttacgccgccttatggcacgtaacgggtttactgaagaagaagctctgatgcgcattcgttcacagtggcccagtgcggagaaagttaaacgtgcagacgctgtcatcgacaataatggcaatattgaagatacccgccgccagctgctggacattttacaccagtgggatctgctggacaaaggtggctccggccaccatcatcaccatcactaatga

SEQ ID NO: 5058 - protein, 211 aa, synthetic construct
  REGION 1..211: note = Variant of 3'O-kinase
MAVTIGLTGGIAAGYSTVSAMMRELGLPVIDADEAARAVMKPGEEAYRDIVAEFGPGILRADGEIDRGKLRAIRFSDEQQRKVLNSIVGPAVLKKMLAEWEAHIGSGAKTVVLDIPLLFESGLQSWMDKVLVVYVDDDVQLRRLMARNGFTEEEALMRIRSQWPSAEKVKRADAVIDNNGNIEDTRRQLLDILHQWDLLDKGGSGHHHHHH

SEQ ID NO: 5059 - DNA, 639 bp, synthetic construct
  misc_feature 1..639: note = Variant of 3'O-kinase
  source 1..639: mol_type = other DNA
atggcggttaccattggtttaacaggagggatcgcagcgggcaaatcgactgtgagtgccatgatgcgtgaactgggtctgccggtcatcgatgctgacgaggcagcacgcgccgttatgaaaccaggcgaagaagcgtatcgcgacattgtagctgaattcgggccgggcatccttcgtgcggatggccgtatcgatcgcgggaaactgcgtgccatccgcttttcggacgaacaacaacgtaaggtgctgaattcgattgtaggtcctgcagtcctgaagaagatgctcgcggagtgggaagctcatatcgggtcaggcgccaagacggttgtgctggatatcccgctgctgttcgaatccggattgcaatcgtggatggacaaagttctcgtggtgtacgttgatgatgatgttcagttacgccgccttatggcacgtaacgggctgactgaagaagaagctctgatgcgcattcgctcgcagtggcccagtgcggagaaagttaaacgtgcagacgctgtcatcgacaataatggcaccattgaagataccgtgcgccagctgctggacattttacaccagtgggatctgctggacaaaggtggctccggccaccatcatcaccatcactaatga

SEQ ID NO: 5060 - protein, 211 aa, synthetic construct
  REGION 1..211: note = Variant of 3'O-kinase
MAVTIGLTGGIAAGKSTVSAMMRELGLPVIDADEAARAVMKPGEEAYRDIVAEFGPGILRADGRIDRGKLRAIRFSDEQQRKVLNSIVGPAVLKKMLAEWEAHIGSGAKTVVLDIPLLFESGLQSWMDKVLVVYVDDDVQLRRLMARNGLTEEEALMRIRSQWPSAEKVKRADAVIDNNGTIEDTVRQLLDILHQWDLLDKGGSGHHHHHH

SEQ ID NO: 5061 - DNA, 639 bp, synthetic construct
  misc_feature 1..639: note = Variant of 3'O-kinase
  source 1..639: mol_type = other DNA
atggcggttaccattggtttaacaggagggatcgcagcgggcaaatcgactgtgagtgccatgatgcgtgaactgggtctgccggtcatcgatgctgacgaggcagcacgcgccgttatgaaaccaggcgaagaagcgtatcgtgacattgtagctgaattcgggccgggcatccttcgtgcggatggccgtatcgatcgcgggaaactgcgtgccatccgcttttcggacgaacaacaacgtaaggtgctgaattcgattgtaggtcctgcagtcctgaagaagatgctcgcggagtgggaagctcatatcgggtcaggcgccaagacggttgtgctggatatcccgctgctgttcgaatccggattgcaatcgtggatggacaaagttctcgtggtgtacgttgatgatgatgttcagttacgccgccttatggcacgtaacgggctgactgaagaagaagctctgatgcgcattcgctcgcagtggccccaggcggagaaagttaaacgtgcagacgctgtcatcgacaataatggcaccattgaagatacccgccgccagctgctggacattttacaccagtgggatctgctggacaaaggtggctccggccaccatcatcaccatcactaatga

SEQ ID NO: 5062 - protein, 211 aa, synthetic construct
  REGION 1..211: note = Variant of 3'O-kinase
MAVTIGLTGGIAAGKSTVSAMMRELGLPVIDADEAARAVMKPGEEAYRDIVAEFGPGILRADGRIDRGKLRAIRFSDEQQRKVLNSIVGPAVLKKMLAEWEAHIGSGAKTVVLDIPLLFESGLQSWMDKVLVVYVDDDVQLRRLMARNGLTEEEALMRIRSQWPQAEKVKRADAVIDNNGTIEDTRRQLLDILHQWDLLDKGGSGHHHHHH

SEQ ID NO: 5063 - DNA, 639 bp, synthetic construct
  misc_feature 1..639: note = Variant of 3'O-kinase
  source 1..639: mol_type = other DNA
atggcggttaccattggtttaacaggagggatcgcagcgggcaaatcgactgtgagtgccatgatgcgtgaactgggtctgccggtcatcgatgctgacgaggcagcacgcgccgttatgaaaccaggcgaagaagcgtatcgcgacattgtagctgaattcgggccgggcatccttgtcgcggatggccgtatcgatcgcgggaaactgcgtgccatccgcttttcggacgaacaacaacgtaaggtgctgaattcgattgtaggtcctgcagtcctgaagaagatgctcgcggagtgggaagctcatatcgggtcaggcgccaagacggttgtgctggatatcccgctgctgttcgaatccggattgcaatcgtggatggacaaagttctcgtggtgtacgttgatgatgatgttcagttacgccgccttatggcacgtaacgggctgactgaagaagaagctctgatgcgcattcgctcgcagtggcccagtgcggagaaagttaaacgtgcagacgctgtcatcgacaataatggcaccattgaagatacccgccgccagctgctggacattgtgcaccagtgggatctgctggacaaaggtggctccggccaccatcatcaccatcactaatga

SEQ ID NO: 5064 - protein, 211 aa, synthetic construct
  REGION 1..211: note = Variant of 3'O-kinase
MAVTIGLTGGIAAGKSTVSAMMRELGLPVIDADEAARAVMKPGEEAYRDIVAEFGPGILVADGRIDRGKLRAIRFSDEQQRKVLNSIVGPAVLKKMLAEWEAHIGSGAKTVVLDIPLLFESGLQSWMDKVLVVYVDDDVQLRRLMARNGLTEEEALMRIRSQWPSAEKVKRADAVIDNNGTIEDTRRQLLDIVHQWDLLDKGGSGHHHHHH

SEQ ID NO: 5065 - DNA, 639 bp, synthetic construct
  misc_feature 1..639: note = Variant of 3'O-kinase
  source 1..639: mol_type = other DNA
atggcggttaccattggtttaacaggagggatcgcagcgggcaaatcgactgtgagtgccatgatgcgtgaactgggtctgccggtcatcgatgctgacgaggcagcacgcgccgttatgaaaccaggcgaagaagcgtatcgcgacattgtagctgaattcgggctgggcatccttcgcgcggatggccgtatcgatcgcgggaaactgcgtgccatccgctttgatgacgaacaaacccgtaaggtgctgaattcgattgtaggtcctgcagtcctgaagaagatgctcgcggagtgggaagctcatatcgggtcaggcgccaagacggttgtgctggatatcccgctgctgttcgaatccggattgcaatcgtggatggacaaagttctcgtggtgtacgttgatgatgatgttcagttacgccgccttatggcacgtaacgggctgactgaagaagaagctctgatgcgcattcgctcgcagtggcccagtgcggagaaagttacgcgtgcagacgctgtcatcgacaataatggcaccattgaagatacccgccgccagctgctggacattttacaccagtgggatctgctggacaaaggtggctccggccaccatcatcaccatcactaatga

SEQ ID NO: 5066 - protein, 211 aa, synthetic construct
  REGION 1..211: note = Variant of 3'O-kinase
MAVTIGLTGGIAAGKSTVSAMMRELGLPVIDADEAARAVMKPGEEAYRDIVAEFGLGILRADGRIDRGKLRAIRFDDEQTRKVLNSIVGPAVLKKMLAEWEAHIGSGAKTVVLDIPLLFESGLQSWMDKVLVVYVDDDVQLRRLMARNGLTEEEALMRIRSQWPSAEKVTRADAVIDNNGTIEDTRRQLLDILHQWDLLDKGGSGHHHHHH

SEQ ID NO: 5067 - DNA, 639 bp, synthetic construct
  misc_feature 1..639: note = Variant of 3'O-kinase
  source 1..639: mol_type = other DNA
atggcggttaccattggtttaacaggagggatcgcagcgggcaaatcgactgtgagtgccatgatgcgtgaactgggtctgccggtcatcgatgctgacgaggcagcacgcgccgttatgaaaccaggcgaagaagcgtatcgtgacattgtagctaaattcgggctgggcatccttgtcgcggatggccgtatcgatcgcgggaaactgcgtgccatccgctttggtgacgaacaacagcgtaaggtgctgaattcgattgtaggtcctgcagtcctgaagaagatgctcgcggagtgggaagctcatatcgggtcaggcgccaagacggttgtgctggatatcccgctgctgttcgaatccggattgcaatcgtggatggacaaagttctcgtggtgtacgttgatgatgatgttcagttacgccgccttatggcacgtaacgggctgactgaagaagaagctctgatgcgcattcgctcgcagtggcccagtgcggagaaagttaaacgtgcagacgctgtcatcgacaataatggcaccattgaagatacccgccgccagctgctggacattctgcaccagtgggatctgctggacaaaggtggctccggccaccatcatcaccatcactaatga

SEQ ID NO: 5068 - protein, 211 aa, synthetic construct
  REGION 1..211: note = Variant of 3'O-kinase
MAVTIGLTGGIAAGKSTVSAMMRELGLPVIDADEAARAVMKPGEEAYRDIVAKFGLGILVADGRIDRGKLRAIRFGDEQQRKVLNSIVGPAVLKKMLAEWEAHIGSGAKTVVLDIPLLFESGLQSWMDKVLVVYVDDDVQLRRLMARNGLTEEEALMRIRSQWPSAEKVKRADAVIDNNGTIEDTRRQLLDILHQWDLLDKGGSGHHHHHH

SEQ ID NO: 5069 - DNA, 639 bp, synthetic construct
  misc_feature 1..639: note = Variant of 3'O-kinase
  source 1..639: mol_type = other DNA
atggcggttaccattggtttaacaggagggatcgcagcgggcaaatcgactgtgagtgccatgatgcgtgaactgggtctgccggtcatcgatgctgacgaggcagcacgcgccgttatgaaaccaggcgaagaagcgtatcgcgacattgtagctgaattcgggccgggcatccttcgtgcggatggccgtatcgatcgcgggaaactgcgtgccatccgctttggtgacgaacaaacccgtaaggtgctgaattcgattgtaggtcctgcagtcctgaagaagatgctcgcggagtgggaagctcatatcgggtcaggcgccaagacggttgtgctggatatcccgctgctgttcgaatccggattgcaatcgtggatggacaaagttctcgtggtgtacgttgatgatgatgttcagttacgccgccttatggcacgtaacgggctgactgaagaagaagctctgatgcgcattcgctcgcagtggcccagtgcggagaaagttaaacgtgcagacgctgtcatcgacaataatggcaccattgaagatacccgccgccagctgctggacattttacaccagtgggatctgctggacaaaggtggctccggccaccatcatcaccatcactaatga

SEQ ID NO: 5070 - protein, 211 aa, synthetic construct
  REGION 1..211: note = Variant of 3'O-kinase
MAVTIGLTGGIAAGKSTVSAMMRELGLPVIDADEAARAVMKPGEEAYRDIVAEFGPGILRADGRIDRGKLRAIRFGDEQTRKVLNSIVGPAVLKKMLAEWEAHIGSGAKTVVLDIPLLFESGLQSWMDKVLVVYVDDDVQLRRLMARNGLTEEEALMRIRSQWPSAEKVKRADAVIDNNGTIEDTRRQLLDILHQWDLLDKGGSGHHHHHH

SEQ ID NO: 5071 - DNA, 639 bp, synthetic construct
  misc_feature 1..639: note = Variant of 3'O-kinase
  source 1..639: mol_type = other DNA
atggcggttaccattggtttaacaggagggatcgcagcgggcaaatcgactgtgagtgccatgatgcgtgaactgggtctgccggtcatcgatgctgacgaggcagcacgcgccgttatgaaaccaggcgaagaagcgtatcgtgacattgtagctgaattcgggctgggcatccttgtcgcggatggccgtatcgatcgcgggaaactgcgtgccatccgcttttcggacgaacaacaacgtaaggtgctgatgtcgattgtaggtcctgcagtcctgaagaagatgctcgcggagtgggaagctcatatcgggtcaggcgccaagacggttgtgctggatatcccgctgctgttcgaatccggattgcaatcgtggatggacaaagttctcgtggtgtacgttgatgatgatgttcagttacgccgccttatggcacgtaacgggctgactgaagaagaagctctgatgcgcattcgctcgcagtggcccagtgcggagaaagttaaacgtgcagacgctgtcatcgacaataatggcaccattgaagatacccgccgccagctgctggacattgtgcaccagtgggatctgctggacaaaggtggctccggccaccatcatcaccatcactaatga

SEQ ID NO: 5072 - protein, 211 aa, synthetic construct
  REGION 1..211: note = Variant of 3'O-kinase
MAVTIGLTGGIAAGKSTVSAMMRELGLPVIDADEAARAVMKPGEEAYRDIVAEFGLGILVADGRIDRGKLRAIRFSDEQQRKVLMSIVGPAVLKKMLAEWEAHIGSGAKTVVLDIPLLFESGLQSWMDKVLVVYVDDDVQLRRLMARNGLTEEEALMRIRSQWPSAEKVKRADAVIDNNGTIEDTRRQLLDIVHQWDLLDKGGSGHHHHHH

SEQ ID NO: 5073 - DNA, 639 bp, synthetic construct
  misc_feature 1..639: note = Variant of 3'O-kinase
  source 1..639: mol_type = other DNA
atggcggttaccattggtttaacaggagggatcgcagcgggcaaatcgactgtgagtgccatgatgcgtgaactgggtctgccggtcatcgatgctgacgaggcagcacgcgccgttatgaaaccaggcgaagaagcgtatgaggacattgtagctaaattcgggccgggcatccttgtcgcggatggccgtatcgatcgcgggaaactgcgtgccatccgctttgatgacgaacaaacccgtaaggtgctgaattcgattgtaggtcctgcagttctgaagaagatgctcgcggagtgggaagctcatatcgggtcaggcgccaagacggttgtgctggatatcccgctgctgttcgaatccggattgcaatcgtggatggacaaagttctcgtggtgtacgttgatgatgatgttcagttacgccgccttatggcacgtaacgggctgactgaagaagaagctctgatgcgcattcgctcgcagtggcccagtgcggagaaagttaagcgtgcagacgctgtcatcgacaataatggcaccattgaagatacccgccgccagctgctggacattgtgcaccagtgggatctgctggacaaaggtggctccggccaccatcatcaccatcactaatga

SEQ ID NO: 5074 - protein, 211 aa, synthetic construct
  REGION 1..211: note = Variant of 3'O-kinase
MAVTIGLTGGIAAGKSTVSAMMRELGLPVIDADEAARAVMKPGEEAYEDIVAKFGPGILVADGRIDRGKLRAIRFDDEQTRKVLNSIVGPAVLKKMLAEWEAHIGSGAKTVVLDIPLLFESGLQSWMDKVLVVYVDDDVQLRRLMARNGLTEEEALMRIRSQWPSAEKVKRADAVIDNNGTIEDTRRQLLDIVHQWDLLDKGGSGHHHHHH

SEQ ID NO: 5075 - DNA, 639 bp, synthetic construct
  misc_feature 1..639: note = Variant of 3'O-kinase
  source 1..639: mol_type = other DNA
atggcggttaccattggtttaacaggagggatcgcagcgggcaaatcgactgtgagtgccatgatgcgtgaactgggtctgccggtcatcgatgctgacgaggcagcacgcgccgttatgaaaccaggcgaagaagcgtatcgcgacattgtagctgaattcgggctgggcatccttgtcgcggatggccgtatcgatcgcgggaaactgcgtgccatccgcttttcggacgaacaacagcgtaaggtgctgaattcgattgtaggtcctgcagtcctgaagaagatgctcgcggagtgggaagctcatatcgggtcaggcgccaagacggttgtgctggatatcccgctgctgttcgaatccggattgcaatcgtggatggacaaagttctcgtggtgtacgttgatgatgatgttcagttacgccgccttatggcacgtaacgggctgactgaagaagaagctctgatgcgcattcgctcgcagtggcccagtgcggagaaagttaaacgtgcagacgctgtcatcgacaataatggcaccattgaagatacccgccgccagctgctggacattctgcaccagtgggatctgctggacaaaggtggctccggccaccatcatcaccatcactaatga

SEQ ID NO: 5076 - protein, 211 aa, synthetic construct
  REGION 1..211: note = Variant of 3'O-kinase
MAVTIGLTGGIAAGKSTVSAMMRELGLPVIDADEAARAVMKPGEEAYRDIVAEFGLGILVADGRIDRGKLRAIRFSDEQQRKVLNSIVGPAVLKKMLAEWEAHIGSGAKTVVLDIPLLFESGLQSWMDKVLVVYVDDDVQLRRLMARNGLTEEEALMRIRSQWPSAEKVKRADAVIDNNGTIEDTRRQLLDILHQWDLLDKGGSGHHHHHH

SEQ ID NO: 5077 - DNA, 639 bp, synthetic construct
  misc_feature 1..639: note = Variant of 3'O-kinase
  source 1..639: mol_type = other DNA
atggcggttaccattggtttaacaggagggatcgcagcgggcaaatcgactgtgagtgccatgatgcgtgaactgggtctgccggtcatcgatgctgacgaggcagcacgcgccgttcgcaaaccaggcgaagaagcgtatcgcgacattgtagctgaattcgggccgggcatccttcgtgcggatggccgtatcgatcgcgggaaactgcgtgccatccgcttttcggacgaacaacaacgtaaggtgctgaattcgattgtaggtcctgcagctctgaagaagatgctcgcggagtgggaagctcatgtcgggtcaggcgccaagacggttgtgctggatatcccgctgctgttcgaatccggattgcaatcgtggatggacaaagttctcgtggtgtacgttgatgatgatgttcagttacgccgccttatggcacgtaacgggctgactgaagaagaagctctgatgcgcattcgctcgcagtggcccagtgcggagaaagttaaacgtgcagacgctgtcatcgacaataatggcaccattgaagatacccgccgccagctgctggacattttacaccagtgggatctgctggacaaaggtggctccggccaccatcatcaccatcactaatga

SEQ ID NO: 5078 - protein, 211 aa, synthetic construct
  REGION 1..211: note = Variant of 3'O-kinase
MAVTIGLTGGIAAGKSTVSAMMRELGLPVIDADEAARAVRKPGEEAYRDIVAEFGPGILRADGRIDRGKLRAIRFSDEQQRKVLNSIVGPAALKKMLAEWEAHVGSGAKTVVLDIPLLFESGLQSWMDKVLVVYVDDDVQLRRLMARNGLTEEEALMRIRSQWPSAEKVKRADAVIDNNGTIEDTRRQLLDILHQWDLLDKGGSGHHHHHH

SEQ ID NO: 5079 - DNA, 639 bp, synthetic construct
  misc_feature 1..639: note = Variant of 3'O-kinase
  source 1..639: mol_type = other DNA
atggcggttaccattggtttaacaggagggatcgcagcgggcaaatcgactgtgagtgccatgatgcgtgaactgggtctgccggtcatcgatgctgacgaggcagcacgcgccgttatgaaaccaggcgaagaagcgtatcgcgacattgtagctgaattcgggctgggcatccttgtcgcggatggccgtatcgatcgcgggaaactgcgtgccatccgctttgatgacgtacaaacccgtaaggtgctgaattcgattgtaggtcctgcagtcctgaagaagatgctcgcggagtgggaagctcatatcgggtcaggcgccaagacggttgtgctggatatcccgctgctgttcgaatccggattgcaatcgtggatggacaaagttctcgtggtgtacgttgatgatgatgttcagttacgccgccttatggcacgtaacgggctgactgaagaagaagctctgatgcgcattcgctcgcagtggcccagtgcggagaaagttaaacgtgcagacgctgtcatcgacaataatggcaccattgaagatacccgccgccagctgctggacattctgcaccagtgggatctgctggacaaaggtggctccggccaccatcatcaccatcactaatga

SEQ ID NO: 5080 - protein, 211 aa, synthetic construct
  REGION 1..211: note = Variant of 3'O-kinase
MAVTIGLTGGIAAGKSTVSAMMRELGLPVIDADEAARAVMKPGEEAYRDIVAEFGLGILVADGRIDRGKLRAIRFDDVQTRKVLNSIVGPAVLKKMLAEWEAHIGSGAKTVVLDIPLLFESGLQSWMDKVLVVYVDDDVQLRRLMARNGLTEEEALMRIRSQWPSAEKVKRADAVIDNNGTIEDTRRQLLDILHQWDLLDKGGSGHHHHHH

SEQ ID NO: 5081 - DNA, 639 bp, synthetic construct
  misc_feature 1..639: note = Variant of 3'O-kinase
  source 1..639: mol_type = other DNA
atggcggttaccattggtttaacaggagggatcgcagcgggcaaatcgactgtgagtgccatgatgcgtgaactgggtctgccggtcatcgatgctgacgaggcagcacgcgccgttatgaaaccaggcgaagaagcgtatcgcgacattgtagctgaattcgggccgggcatccttgctgaagatggccgtatcgatcgcgggaaactgcgtgccatccgcttttcggacgaacaacaacgtaaggtgctgaattcgattgtaggtcctgcagtcctgaagaagatgctcgcggagtgggaagctcatatcgggtcaggcgccaagacggttgtgctggatatcccgctgctgttcgaatccggattgcaatcgtggatggacaaagttctcgtggtgtacgttgatgatgatgttcagttacgccgccttatggcacgtaacgggctgactgaagaagaagctctgatgcgcattcgctcgcagtggcccagtgcggagaaagttaaacgtgcagacgctgtcatcgacaataatggcaccattgaagatacccgccgccagctgctggacattttacaccagtgggatctgctggacaaaggtggctccggccaccatcatcaccatcactaatga

SEQ ID NO: 5082 - protein, 211 aa, synthetic construct
  REGION 1..211: note = Variant of 3'O-kinase
MAVTIGLTGGIAAGKSTVSAMMRELGLPVIDADEAARAVMKPGEEAYRDIVAEFGPGILAEDGRIDRGKLRAIRFSDEQQRKVLNSIVGPAVLKKMLAEWEAHIGSGAKTVVLDIPLLFESGLQSWMDKVLVVYVDDDVQLRRLMARNGLTEEEALMRIRSQWPSAEKVKRADAVIDNNGTIEDTRRQLLDILHQWDLLDKGGSGHHHHHH

SEQ ID NO: 5083 - DNA, 639 bp, synthetic construct
  misc_feature 1..639: note = Variant of 3'O-kinase
  source 1..639: mol_type = other DNA
atggcggttaccattggtttaacaggagggatcgcagctggcaaatcgactgtgagtgccatgatgcgtgaactgggtctgccagtcatcgatgctgacgaggcagcacgcgccgttatgaaaccaggcgaagaagcgtatcgcgatattgtagctgaattcgggccgggcatccttcgtgcggatggccgtatcgatcgcgggaaactgcgtgccatccgcttttcggacgaacaacaacgtaaggtgctgaattcgattgtaggtcctgcagtcctgaagaagatgctcgcggagtggctggctcatatcgggtcaggcgcctcgacggttgtgctggatatcccgctgctgttcgaatccggattgcaatcgtggatggacaaagttctcgtggtgtacgttgatgatgatgttcagttacgccgccttatggcacgtaacgggctgactgaagaagaagctctgatgcgcattcgctcgcagtggcccagtgcggagaaagttaaacgtgcagacgctgtcatcgacaataatggcaccattgaagatacccgccgccagctgctggacattttacaccagtgggatagcctggacaaaggtggctccggccaccatcatcaccatcactaatga

SEQ ID NO: 5084 - protein, 211 aa, synthetic construct
  REGION 1..211: note = Variant of 3'O-kinase
MAVTIGLTGGIAAGKSTVSAMMRELGLPVIDADEAARAVMKPGEEAYRDIVAEFGPGILRADGRIDRGKLRAIRFSDEQQRKVLNSIVGPAVLKKMLAEWLAHIGSGASTVVLDIPLLFESGLQSWMDKVLVVYVDDDVQLRRLMARNGLTEEEALMRIRSQWPSAEKVKRADAVIDNNGTIEDTRRQLLDILHQWDSLDKGGSGHHHHHH

SEQ ID NO: 5085 - DNA, 639 bp, synthetic construct
  misc_feature 1..639: note = Variant of 3'O-kinase
  source 1..639: mol_type = other DNA
atggcggttaccattggtttaacaggagggatcgcagcgggcaaatcgactgtgagtgccatgatgcgtgaactgggttttccggtcatcgatgctgacgaggcagcacgcgccgttatgaaaccaggcgaagaagcgtatcgcgacattgtagctgaattcgggccgggcatccttcgtgcggatggccgtatcgatcgcgggaaactgcgtgccatccgcttttcggacgaacaacaacgtaaggtgctgaattcgattgtaggtcctgcagtcctgaagaagatgctcgcggagtgggaagctcatatcgggtcaggcgccaagacggttgtgctggatatcccgctgctgttcgaatccggattgcaatcgtggatggacaaagttctcgtggtgtacgttgatgatgatgttcagttacgccgccttatggcacgtaacgggctgactgaagaagaagctctgatgcgcattcgctcgcagtggcccagtgcggagaaagttaaacgtgcagacgctgtcatcgacaataatggcaccattgaagatacccgccgccagctgctggacattttacaccagtgggatctgctggacaaaggtggctccggccaccatcatcaccatcactaatga

SEQ ID NO: 5086 - protein, 211 aa, synthetic construct
  REGION 1..211: note = Variant of 3'O-kinase
MAVTIGLTGGIAAGKSTVSAMMRELGFPVIDADEAARAVMKPGEEAYRDIVAEFGPGILRADGRIDRGKLRAIRFSDEQQRKVLNSIVGPAVLKKMLAEWEAHIGSGAKTVVLDIPLLFESGLQSWMDKVLVVYVDDDVQLRRLMARNGLTEEEALMRIRSQWPSAEKVKRADAVIDNNGTIEDTRRQLLDILHQWDLLDKGGSGHHHHHH

SEQ ID NO: 5087 - DNA, 639 bp, synthetic construct
  misc_feature 1..639: note = Variant of 3'O-kinase
  source 1..639: mol_type = other DNA
atggcggttaccattggtttaacaggagggatcgcagcgggcaaatcgactgtgagtgccatgatgcgtgaactgggttttccggtcatcgatgctgacgaggcagcacgcgccgttatgaaaccaggcgaagaagcgtatcgcggcattatcgctgaattcgggccgggcatccttcgtgcggatggccgtatcgatcgcgggaaactgcgtgccatccgcttttcggacgaacaacaacgtaaggtgctgaattcgattgtaggtcctgcagtcctgaagaagatgctcgcggagtgggaagctcatatcgggtcaggcgccaagacggttgtgctggatatcccgctgctgttcgaatccggattgcaaagttggatggacaaagttctcgtggtgtacgttgatgatgatgttcagttacgccgccttatggcacgtaacgggctgactgaagaagaagctctgatgcgcattcgctcgcagtggcccagtgcggagaaagttaaacgtgcagacgctgtcatcgacaataatggcaccattgaagatacccgccgccagctgctggacattttacaccagtgggatctgctggacaaaggtggctccggccaccatcatcaccatcactaatga

SEQ ID NO: 5088 - protein, 211 aa, synthetic construct
  REGION 1..211: note = Variant of 3'O-kinase
MAVTIGLTGGIAAGKSTVSAMMRELGFPVIDADEAARAVMKPGEEAYRGIIAEFGPGILRADGRIDRGKLRAIRFSDEQQRKVLNSIVGPAVLKKMLAEWEAHIGSGAKTVVLDIPLLFESGLQSWMDKVLVVYVDDDVQLRRLMARNGLTEEEALMRIRSQWPSAEKVKRADAVIDNNGTIEDTRRQLLDILHQWDLLDKGGSGHHHHHH

SEQ ID NO: 5089 - DNA, 639 bp, synthetic construct
  misc_feature 1..639: note = Variant of 3'O-kinase
  source 1..639: mol_type = other DNA
atggcggttaccattggtttaacaggagggatcgcagcgggcaaatcgactgtgagtgccatgatgcgtgaactgggtctgccggtcatcgatgctgacgaggcagcacgcgccgttatgaaaccaggcgaagaagcgtatcgcgacattgtagctgaattcgggctgggcatccttcgcgcggatggccgtatcgatcgcgggaaactgcgtgccatccgcttttcggacgaacaacagcgtaaggtgctgatgtcgattgtaggtcctgcagtcctgaagaagatgctcgcggagtgggaagctcatgtcgggtcaggcgccaagacggttgtgctggatatcccgctgctgttcgaatccggattgcaatcgtggatggacaaagttctcgtggtgtacgttgatgatgatgttcagttacgccgccttatggcacgtaacgggctgactgaagaagaagctctgatgcgcattcgctcgcagtggcccagtgcggagaaagttaaacgtgcagacgctgtcatcgacaataatggcaccattgaagatacccgccgccagctgctggacattttacaccagtgggatctgctggacaaaggtggctccggccaccatcatcaccatcactaatga

SEQ ID NO: 5090 - protein, 211 aa, synthetic construct
  REGION 1..211: note = Variant of 3'O-kinase
MAVTIGLTGGIAAGKSTVSAMMRELGLPVIDADEAARAVMKPGEEAYRDIVAEFGLGILRADGRIDRGKLRAIRFSDEQQRKVLMSIVGPAVLKKMLAEWEAHVGSGAKTVVLDIPLLFESGLQSWMDKVLVVYVDDDVQLRRLMARNGLTEEEALMRIRSQWPSAEKVKRADAVIDNNGTIEDTRRQLLDILHQWDLLDKGGSGHHHHHH

SEQ ID NO: 5091 - DNA, 639 bp, synthetic construct
  misc_feature 1..639: note = Variant of 3'O-kinase
  source 1..639: mol_type = other DNA
atggcggttaccattggtttaacaggagggatcgcagcgggcaaatcgactgtgagtgccatgatgcgtgaactgggtctgccggtcatcgatgctgacgaggcagcacgcgccgttatgaaaccaggcgaagaagcgtatgctgacattgtagctgaattcgggccgggcatccttcgtgcggatggccgtatcgatcgcgggaaactgcgtgccatccgcttttcggacgaacaacaacgtaaggtgctgaattcgattgtaggtcctgcagtcctgaagaagatgctcgcggagtgggaagctcatatcgggtcaggcgccaagacggttgtgctggatatcccgctgctgttcgaatccggattgcaatcgtggatggacaaagttctcgtggtgtacgttgatgatgatgttcagttacgccgccttatggcacgtaacgggctgactgaagaagaagctctgatgcgcattcgctcgcagtggcccagtgcggagaaagttaaacgtgcagacgctgtcatcgacaataatggcaccattgaagatacccgccgccagctgctggacattttacaccagtgggatctgctggacaaaggtggctccggccaccatcatcaccatcactaatga

SEQ ID NO: 5092 - protein, 211 aa, synthetic construct
  REGION 1..211: note = Variant of 3'O-kinase
MAVTIGLTGGIAAGKSTVSAMMRELGLPVIDADEAARAVMKPGEEAYADIVAEFGPGILRADGRIDRGKLRAIRFSDEQQRKVLNSIVGPAVLKKMLAEWEAHIGSGAKTVVLDIPLLFESGLQSWMDKVLVVYVDDDVQLRRLMARNGLTEEEALMRIRSQWPSAEKVKRADAVIDNNGTIEDTRRQLLDILHQWDLLDKGGSGHHHHHH

SEQ ID NO: 5093 - DNA, 639 bp, synthetic construct
  misc_feature 1..639: note = Variant of 3'O-kinase
  source 1..639: mol_type = other DNA
atggcggttaccattggtttaacaggagggatcgcagctggcaaatcgactgtgagtgccatgatgcgtgaactgggtctgccggtcatcgatgctgacgaggcagcacgcgccgttcgcaaaccaggcgaagaagcgtatcgcgacattgtagctgaattcgggccgggcatccttcgtgcggatggccgtatcgatcgcgggaaactgcgtgccatccgcttttcggacgaacaacaacgtaaggtgctgaattcgattgtaggtcctgcagtcctgaagaagatgctcgcggagtgggaagctcatatcgggtcaggcgccaagacggttgtgctggatatcccgctgctgttcgaatccggattgcaatcgtggatggacaaagttctcgtggtgtacgttgatgatgatgttcagttacgccgccttatggcacgtaacgggctgactgaagaagaagctctgatgcgcattcgctcgcagtggcccagtgcggagaaagttaaacgtgcagacgctgtcatcgacaataatggcaccattgaagatacccgccgccagctgctggacattttacaccagtgggatctgctggacaaaggtggctccggccaccatcatcaccatcactaatga

SEQ ID NO: 5094 - protein, 211 aa, synthetic construct
  REGION 1..211: note = Variant of 3'O-kinase
MAVTIGLTGGIAAGKSTVSAMMRELGLPVIDADEAARAVRKPGEEAYRDIVAEFGPGILRADGRIDRGKLRAIRFSDEQQRKVLNSIVGPAVLKKMLAEWEAHIGSGAKTVVLDIPLLFESGLQSWMDKVLVVYVDDDVQLRRLMARNGLTEEEALMRIRSQWPSAEKVKRADAVIDNNGTIEDTRRQLLDILHQWDLLDKGGSGHHHHHH

SEQ ID NO: 5095 - DNA, 639 bp, synthetic construct
  misc_feature 1..639: note = Variant of 3'O-kinase
  source 1..639: mol_type = other DNA
atggcggttaccattggtttaacaggagggatcgcagctggcaaatcgactgtgagtgccatgatgcgtgaactgggtctgccggtcatcgatgctgacgaggcagcacgcgccgttatgaaaccaggcgaagaagcgtatcgccagattgtagctgaattcgggccgggcatccttcgtgcggatggccgtatcgatcgcgggaaactgcgtgccatccgcttttcggacgaacaacaacgtaaggtgctgaattcgattgtaggtcctgcagtcctgaagaagatgctcgcggagtgggaagctcatatcgggtcaggcgccaagacggttgtgctggatatcccgctgctgttcgaatccggattgcaatcgtggatggacaaagttctcgtggtgtacgttgatgatgatgttcagttacgccgccttatggcacgtaacgggctgactgaagaagaagctctgatgcgcattcgctcgcagtggcccagtgcggagaaagttaaacgtgcagacgctgtcatcgacaataatggcaccattgaagatacccgccgccagctgctggacattttacaccagtgggatctgctggacaaaggtggctccggccaccatcatcaccatcactaatga

SEQ ID NO: 5096 - protein, 211 aa, synthetic construct
  REGION 1..211: note = Variant of 3'O-kinase
MAVTIGLTGGIAAGKSTVSAMMRELGLPVIDADEAARAVMKPGEEAYRQIVAEFGPGILRADGRIDRGKLRAIRFSDEQQRKVLNSIVGPAVLKKMLAEWEAHIGSGAKTVVLDIPLLFESGLQSWMDKVLVVYVDDDVQLRRLMARNGLTEEEALMRIRSQWPSAEKVKRADAVIDNNGTIEDTRRQLLDILHQWDLLDKGGSGHHHHHH

SEQ ID NO: 5097 - DNA, 639 bp, synthetic construct
  misc_feature 1..639: note = Variant of 3'O-kinase
  source 1..639: mol_type = other DNA
atggcggttaccattggtttaacaggagggatcgcagcgggcaaatcgactgtgagtgccatgatgcgtgaactgggtctgccggtcatcgatgctgacgaggcagcacgcgccgttatgaaaccaggcgaagaagcgtatcgcgacattgtagctgaattcgggctgggcatccttcgcgcggatggccgtatcgatcgcgggaaactgcgtgccatccgcttttcggacgaacaacaacgtaaggtgctgaattcgattgtaggtcctgcagtcctgaagaagatgctcgcggagtgggaagctcatatcgggtcaggcgccaagacggttgtgctggatatcccgctgctgttcgaatccggattgcaatcgtggatggacaaagttctcgtggtgtacgttgatgatgatgttcagttacgccgccttatggcacgtaacgggctgactgaagaagaagctctgatgcgcattcgctcgcagtggcccagtgcggcgaaagttaagcgtgcagacgctgtcatcgacaataatggcaccattgaagatacccgccgccagctgctggacattgtgcaccagtgggatctgctggacaaaggtggctccggccaccatcatcaccatcactaatga

SEQ ID NO: 5098 - protein, 211 aa, synthetic construct
  REGION 1..211: note = Variant of 3'O-kinase
MAVTIGLTGGIAAGKSTVSAMMRELGLPVIDADEAARAVMKPGEEAYRDIVAEFGLGILRADGRIDRGKLRAIRFSDEQQRKVLNSIVGPAVLKKMLAEWEAHIGSGAKTVVLDIPLLFESGLQSWMDKVLVVYVDDDVQLRRLMARNGLTEEEALMRIRSQWPSAAKVKRADAVIDNNGTIEDTRRQLLDIVHQWDLLDKGGSGHHHHHH

SEQ ID NO: 5099 - DNA, 639 bp, synthetic construct
  misc_feature 1..639: note = Variant of 3'O-kinase
  source 1..639: mol_type = other DNA
atggcggttaccattggtttaacaggagggatcgcagcgggcaaatcgactgtgagtgccatgatgcgtgaactgggtctgccggtcatcgatgctgacgaggcagcacgcgccgttatgaaaccaggcgaagaagcgtatgaggacattgtagctgaattcgggctgggcatccttgtcgcggatggccgtatcgatcgcgggaaactgcgtgccatccgctttgatgacgaacaacagcgtaaggtgctgaattcgattgtaggtcctgcagtcctgaagaagatgctcgcggagtgggaagctcatatcgggtcaggcgccaagacggttgtgctggatatcccgctgctgttcgaatccggattgcaatcgtggatggacaaagttctcgtggtgtacgttgatgatgatgttcagttacgccgccttatggcacgtaacgggctgactgaagaagaagctctgatgcgcattcgctcgcagtggcccagtgcggcgaaagttacgcgtgcagacgctgtcatcgacaataatggcaccattgaagatacccgccgccagctgctggacattgtgcaccagtgggatctgctggacaaaggtggctccggccaccatcatcaccatcactaatga

SEQ ID NO: 5100 - protein, 211 aa, synthetic construct
  REGION 1..211: note = Variant of 3'O-kinase
MAVTIGLTGGIAAGKSTVSAMMRELGLPVIDADEAARAVMKPGEEAYEDIVAEFGLGILVADGRIDRGKLRAIRFDDEQQRKVLNSIVGPAVLKKMLAEWEAHIGSGAKTVVLDIPLLFESGLQSWMDKVLVVYVDDDVQLRRLMARNGLTEEEALMRIRSQWPSAAKVTRADAVIDNNGTIEDTRRQLLDIVHQWDLLDKGGSGHHHHHH

SEQ ID NO: 5101 - DNA, 639 bp, synthetic construct
  misc_feature 1..639: note = Variant of 3'O-kinase
  source 1..639: mol_type = other DNA
atggcggttaccattggtttaacaggagggatcgcagcgggcaaatcgactgtgagtgccatgatgcgtgaactgggtctgccggtcatcgatgctgacgaggcagcacgcgccgttatgaaaccaggcgaagaagcgtatcgcgacattgtagctgaattcgggctgggcatccttcgcgcggatggccgtatcgatcgcgggaaactgcgtgccatccgctttggtgacgaacaaacccgtaaggtgctgaattcgattgtaggtcctgcagtcctgaagaagatgctcgcggagtgggaagctcatatcgggtcaggcgccaagacggttgtgctggatatcccgctgctgttcgaatccggattgcaatcgtggatggacaaagttctcgtggtgtacgttgatgatgatgttcagttacgccgccttatggcacgtaacgggctgactgaagaagaagctctgatgcgcattcgctcgcagtggcccagtgcggagaaagttaagcgtgcagacgctgtcatcgacaataatggcaccattgaagatacccgccgccagctgctggacattgtgcaccagtgggatctgctggacaaaggtggctccggccaccatcatcaccatcactaatga

SEQ ID NO: 5102 - protein, 211 aa, synthetic construct
  REGION 1..211: note = Variant of 3'O-kinase
MAVTIGLTGGIAAGKSTVSAMMRELGLPVIDADEAARAVMKPGEEAYRDIVAEFGLGILRADGRIDRGKLRAIRFGDEQTRKVLNSIVGPAVLKKMLAEWEAHIGSGAKTVVLDIPLLFESGLQSWMDKVLVVYVDDDVQLRRLMARNGLTEEEALMRIRSQWPSAEKVKRADAVIDNNGTIEDTRRQLLDIVHQWDLLDKGGSGHHHHHH

SEQ ID NO: 5103 - DNA, 639 bp, synthetic construct
  misc_feature 1..639: note = Variant of 3'O-kinase
  source 1..639: mol_type = other DNA
atggcggttaccattggtttaacaggagggatcgcagctggcaaatcgactgtgagtgccatgatgcgtgaactgggtctgccggtcatcgatgctgacgaggcagcacgcgccgttatgaaaccaggcgaagaagcgtatcgcgacattgtagctgaattcgggccgggcatccttcgtgcggatggccgtatcgatcgcgggaaactgcgtgccatccgcttttcggacgaacaacaacgtaaggtgctgaattcgattgtaggtcctgcagtcctgaagaagatgctcgcggagtggctggctcatatcgggtcaggcgccaagacggttgtgctggatatcccgctgctgttcgaatccggattgcaatcgtggatggacaaagttctcgtggtgtacgttgatgatgatgttcagttacgccgccttatggcacgtaacgggctgactgaagaagaagctctgatgcgcattcgctcgcagtggcccagtgcggagaaagttaaacgtgcagacgctgtcatcgacaataatggcaccattgaagatacccgccgccagctgctggacattttacaccagtgggatctgctggacaaaggtggctccggccaccatcatcaccatcactaatga

SEQ ID NO: 5104 - protein, 211 aa, synthetic construct
  REGION 1..211: note = Variant of 3'O-kinase
MAVTIGLTGGIAAGKSTVSAMMRELGLPVIDADEAARAVMKPGEEAYRDIVAEFGPGILRADGRIDRGKLRAIRFSDEQQRKVLNSIVGPAVLKKMLAEWLAHIGSGAKTVVLDIPLLFESGLQSWMDKVLVVYVDDDVQLRRLMARNGLTEEEALMRIRSQWPSAEKVKRADAVIDNNGTIEDTRRQLLDILHQWDLLDKGGSGHHHHHH

SEQ ID NO: 5105 - DNA, 639 bp, synthetic construct
  misc_feature 1..639: note = Variant of 3'O-kinase
  source 1..639: mol_type = other DNA
atggcggttaccattggtttaacaggagggatcgcagcgggcaaatcgactgtgagtgccatgatgcgtgaactgggtctgccggtcatcgatgctgacgaggcagcacgcgccgttatgaaaccaggcgaagaagcgtatcgcgacattgtagctgaattcgggccgggcatccttcgtgcggatggccgtatcgatcgcgggaaactgcgtgccatccgcttttcggacgaacaacaacgtaaggtgctgaattcgattgtaggtcctgcagtcctgaagaagatgctcgcggagtgggaagctcatatcgggtcaggcgccaagacggttgtgctggatatcccgctgctgttcgaatccggattgcaagagtggatggacaaagttctcgtggtgtacgttgatgatgatgttcagttacgccgccttatggcacgtaacgggctgactgaagaagaagctctgatgcgcattcgctcgcagtggcccagtgcggagaaagttaaacgtgcagacgctgtcatcgacaataatggcaccattgaagatacccgccgccagctgctggacattttacaccagtgggatctgctggacaaaggtggctccggccaccatcatcaccatcactaatga

SEQ ID NO: 5106 - protein, 211 aa, synthetic construct
  REGION 1..211: note = Variant of 3'O-kinase
MAVTIGLTGGIAAGKSTVSAMMRELGLPVIDADEAARAVMKPGEEAYRDIVAEFGPGILRADGRIDRGKLRAIRFSDEQQRKVLNSIVGPAVLKKMLAEWEAHIGSGAKTVVLDIPLLFESGLQEWMDKVLVVYVDDDVQLRRLMARNGLTEEEALMRIRSQWPSAEKVKRADAVIDNNGTIEDTRRQLLDILHQWDLLDKGGSGHHHHHH

SEQ ID NO: 5107 - DNA, 639 bp, synthetic construct
  misc_feature 1..639: note = Variant of 3'O-kinase
  source 1..639: mol_type = other DNA
atggcggttaccattggtttaacaggagggatcgcagcgggcaaatcgactgtgagtgccatgatgcgtgaactgggttttccggtcatcgatgctgacgaggctgcacgcgccgttatgaaaccaggcgaagaagcgtatcgcctgattgtcgctgaattcgggccgggcatccttcgtgcggatggccgtatcgatcgcgggaaactgcgtgccatccgcttttcggacgaacaacaacgtaaggtgctgaattcgattgtaggtcctgcagtcctgaagaagatgctcgcggagtgggaagctcatatcgggtcaggcgccaagacggttgtgctggatatcccgctgctgttcgaatccggattgcaaagttggatggacaaagttctcgtggtgtacgttgatgatgatgttcagttacgccgccttatggcacgtaacgggctgactgaagaagaagctctgatgcgcattcgctcgcagtggcccagtgcggagaaagttaaagctgcagacgctgtcatcgacaataatggcaccattgaagatacccgccgccagctgctggacattttacaccagtgggatctgctggacaaaggtggctccggccaccatcatcaccatcactaatga

SEQ ID NO: 5108 - protein, 211 aa, synthetic construct
  REGION 1..211: note = Variant of 3'O-kinase
MAVTIGLTGGIAAGKSTVSAMMRELGFPVIDADEAARAVMKPGEEAYRLIVAEFGPGILRADGRIDRGKLRAIRFSDEQQRKVLNSIVGPAVLKKMLAEWEAHIGSGAKTVVLDIPLLFESGLQSWMDKVLVVYVDDDVQLRRLMARNGLTEEEALMRIRSQWPSAEKVKAADAVIDNNGTIEDTRRQLLDILHQWDLLDKGGSGHHHHHH

SEQ ID NO: 5109 - DNA, 639 bp, synthetic construct
  misc_feature 1..639: note = Variant of 3'O-kinase
  source 1..639: mol_type = other DNA
atggcggttaccattggtttaacaggagggatcgcagctggcaaatcgactgtgagtgccatgatgcgtgaactgggtctgccggtcatcgatgctgacgaggcagcacgcgccgttatgaaaccaggcgaagaagcgtatcgcaatattgtagctgaattcgggccgggcatccttcgtgcggatggccgtatcgatcgcgggaaactgcgtgccatccgcttttcggacgaacaacaacgtaaggtgctgaattcgattgtaggtcctgcagtcctgaagaagatgctcgcggagtgggaagctcatatcgggtcaggcgccaagacggttgtgctggatatcccgctgctgttcgaatccggattgcaatcgtggatggacaaagttctcgtggtgtacgttgatgatgatgttcagttacgccgccttatggcacgtaacgggctgactgaagaagaagctctgatgcgcattcgctcgcagtggcccagtgcggagaaagttaaacgtgcagacgctgtcatcgacaataatggcaccattgaagatacccgccgccagctgctggacattttacaccagtgggatctgctggacaaaggtggctccggccaccatcatcaccatcactaatga

SEQ ID NO: 5110 - protein, 211 aa, synthetic construct
  REGION 1..211: note = Variant of 3'O-kinase
MAVTIGLTGGIAAGKSTVSAMMRELGLPVIDADEAARAVMKPGEEAYRNIVAEFGPGILRADGRIDRGKLRAIRFSDEQQRKVLNSIVGPAVLKKMLAEWEAHIGSGAKTVVLDIPLLFESGLQSWMDKVLVVYVDDDVQLRRLMARNGLTEEEALMRIRSQWPSAEKVKRADAVIDNNGTIEDTRRQLLDILHQWDLLDKGGSGHHHHHH

SEQ ID NO: 5111 - DNA, 639 bp, synthetic construct
  misc_feature 1..639: note = Variant of 3'O-kinase
  source 1..639: mol_type = other DNA
atggcggttaccattggtttaacaggagggatcgcagcgggcaaatcgactgtgagtgccatgatgcgtgaactgggtctgccggtcatcgatgctgacgaggcagcacgcgccgttatgaaaccaggcgaagaagcgtatcgcgacattgtagctgaattcgggccgggcatccttgtcgcggatggccgtatcgatcgcgggaaactgcgtgccatccgcttttcggacgaacaacaacgtaaggtgctgaattcgattgtaggtcctgcagtcctgaagaagatgctcgcggagtgggaagctcatatcgggtcaggcgccaagacggttgtgctggatatcccgctgctgttcgaatccggattgcaatcgtggatggacaaagttctcgtggtgtacgttgatgatgatgttcagttacgccgccttatggcacgtaacgggctgactgaagaagaagctctgatgcgcattcgctcgcagtggcccagtgcggagaaagttaaacgtgcagacgctgtcatcgacaataatggcaccattgaagatacccgccgccagctgctggacattttacaccagtgggatctgctggacaaaggtggctccggccaccatcatcaccatcactaatga

SEQ ID NO: 5112 - protein, 211 aa, synthetic construct
  REGION 1..211: note = Variant of 3'O-kinase
MAVTIGLTGGIAAGKSTVSAMMRELGLPVIDADEAARAVMKPGEEAYRDIVAEFGPGILVADGRIDRGKLRAIRFSDEQQRKVLNSIVGPAVLKKMLAEWEAHIGSGAKTVVLDIPLLFESGLQSWMDKVLVVYVDDDVQLRRLMARNGLTEEEALMRIRSQWPSAEKVKRADAVIDNNGTIEDTRRQLLDILHQWDLLDKGGSGHHHHHH

SEQ ID NO: 5113 - DNA, 639 bp, synthetic construct
  misc_feature 1..639: note = Variant of 3'O-kinase
  source 1..639: mol_type = other DNA
atggcggttaccattggtttaacaggagggatcgcagcgggcaaatcgactgtgagtgccatgatgcgtgaactgggtctgccggtcatcgatgctgacgaggcagcacgcgccgttatgaaaccaggcgaagaagcgtatcgcgacattgtagctgaattcgggccgggcatccttcgtgcggatggccgtatcgatcgcgggaaactgcgtgccatccgcttttcggacgaacaacaacgtaaggtgctgaattcgattgtaggtcctgcagtcctgaagaagatgctcggggagtgggaagctcatatcgggtcaggcgccaagacggttgtgctggatatcccgctgctgttcgaatccggattgcaatcgtggatggacaaagttctcgtggtgtacgttgatgatgatgttcagttacgccgccttatggcacgtaacgggctgactgaagaagaagctctgatgcgcattcgctcgcagtggcccagtgcggagaaagttaaacgtgcagacgctgtcatcgacaataatggcaccattgaagatacccgccgccagctgctggacattttacaccagtgggatctgctggacaaaggtggctccggccaccatcatcaccatcactaatga

SEQ ID NO: 5114 - protein, 211 aa, synthetic construct
  REGION 1..211: note = Variant of 3'O-kinase
MAVTIGLTGGIAAGKSTVSAMMRELGLPVIDADEAARAVMKPGEEAYRDIVAEFGPGILRADGRIDRGKLRAIRFSDEQQRKVLNSIVGPAVLKKMLGEWEAHIGSGAKTVVLDIPLLFESGLQSWMDKVLVVYVDDDVQLRRLMARNGLTEEEALMRIRSQWPSAEKVKRADAVIDNNGTIEDTRRQLLDILHQWDLLDKGGSGHHHHHH

SEQ ID NO: 5115 - DNA, 639 bp, synthetic construct
  misc_feature 1..639: note = Variant of 3'O-kinase
  source 1..639: mol_type = other DNA
atggcggttaccattggtttaacaggagggatcgcagcgggcaaatcgactgtgagtgccatgatgcgtgaactgggtctgccggtcatcgatgctgacgaggcagcacgcgccgttatgaaaccaggcgaagaagcgtatcgcgacattgtagctgaattcgggccgggcatccttcgtgcggatggccgtatcgatcgcgggaaactgcgtgccatccgcttttcggacgaacaacaacgtaaggtgctgaattcgattgtaggtcctgcagtcctgaagaagatgctcgcggagtgggaagctcatatcgggtcaggcgccaagacggttgtgctggatatcccgctgctgttcgaatccggattgcaaagttggatggacaaagttctcgtggtgtacgttgatgatgatgttcagttacgccgccttatggcacgtaacgggctgactgaagaagaagctctgatgcgcattcgctcgcagtggcccagtgcggagaaagttaaactggcagacgctgtcatcgacaataatggcaccattgaagatacccctcgccagctgctggacattttacaccagtgggatctgctggacaaaggtggctccggccaccatcatcaccatcactaatga

SEQ ID NO: 5116 - protein, 211 aa, synthetic construct
  REGION 1..211: note = Variant of 3'O-kinase
MAVTIGLTGGIAAGKSTVSAMMRELGLPVIDADEAARAVMKPGEEAYRDIVAEFGPGILRADGRIDRGKLRAIRFSDEQQRKVLNSIVGPAVLKKMLAEWEAHIGSGAKTVVLDIPLLFESGLQSWMDKVLVVYVDDDVQLRRLMARNGLTEEEALMRIRSQWPSAEKVKLADAVIDNNGTIEDTPRQLLDILHQWDLLDKGGSGHHHHHH

SEQ ID NO: 5117 - DNA, 639 bp, synthetic construct
  misc_feature 1..639: note = Variant of 3'O-kinase
  source 1..639: mol_type = other DNA
atggcggttaccattggtttaacaggagggatcgcagcgggcaaatcgactgtgagtgccatgatgcgtgaactgggtctgccggtcatcgatgctgacgaggcagcacgcgccgttatgaaaccaggcgaagaagcgtatcgcgacattgtagctgaattcgggccgggcatccttgctgaagatggccgtatcgatcgcgggaaactgcgtgccatccgcttttcggacgaacaacaacgtaaggtgctgaattcgattgtaggtcctgcagtcctgaagaagatgctcgcggagtgggaagctcatatcgggtcaggcgccaagacggttgtgctggatatcccgctgctgttcgaatccggattgcaatcgtggatggacaaagttctcgtggtgtacgttgatgatgatgttcagttacgccgccttatggcacgtaacgggctgactgaagaagaagctctgatgcgcattcgctcgcagtggccccaggcggagaaagttaaacgtgcagacgctgtcatcgacaataatggcaccattgaagatacccgccgccagctgctggacattttacaccagtgggatctgctggacaaaggtggctccggccaccatcatcaccatcactaatga

SEQ ID NO: 5118 - protein, 211 aa, synthetic construct
  REGION 1..211: note = Variant of 3'O-kinase
MAVTIGLTGGIAAGKSTVSAMMRELGLPVIDADEAARAVMKPGEEAYRDIVAEFGPGILAEDGRIDRGKLRAIRFSDEQQRKVLNSIVGPAVLKKMLAEWEAHIGSGAKTVVLDIPLLFESGLQSWMDKVLVVYVDDDVQLRRLMARNGLTEEEALMRIRSQWPQAEKVKRADAVIDNNGTIEDTRRQLLDILHQWDLLDKGGSGHHHHHH

SEQ ID NO: 5119 - DNA, 639 bp, synthetic construct
  misc_feature 1..639: note = Variant of 3'O-kinase
  source 1..639: mol_type = other DNA
atggcggttaccattggtttaacaggagggatcgcagcgggcaaatcgactgtgagtgccatgatgcgtgaactgggtctgccggtcatcgatgctgacgaggcagcacgcgccgttatgaaaccaggcgaagaagcgtatcgcgacattgtagctgaattcgggccgggcatccttgctgaagatggccgtatcgatcgcgggaaactgcgtgccatccgcttttcggacgaacaacaacgtaaggtgctgaattcgattgtaggtcctgcagtcctgaagaagatgctcgcggagaatgaagctcatatcgggtcaggcgccaagacggttgtgctggatatcccgctgctgttcgaatccggattgcaatcgtggatggacaaagttctcgtggtgtacgttgatgatgatgttcagttacgccgccttatggcacgtaacgggctgactgaagaagaagctctgatgcgcattcgctcgcagtggcccagtgcggagaaagttaaacgtgcagacgctgtcatcgacaataatggcaccattgaagatacccgccgccagctgctggacattttacaccagtgggatctgctggacaaaggtggctccggccaccatcatcaccatcactaatga

SEQ ID NO: 5120 - protein, 211 aa, synthetic construct
  REGION 1..211: note = Variant of 3'O-kinase
MAVTIGLTGGIAAGKSTVSAMMRELGLPVIDADEAARAVMKPGEEAYRDIVAEFGPGILAEDGRIDRGKLRAIRFSDEQQRKVLNSIVGPAVLKKMLAENEAHIGSGAKTVVLDIPLLFESGLQSWMDKVLVVYVDDDVQLRRLMARNGLTEEEALMRIRSQWPSAEKVKRADAVIDNNGTIEDTRRQLLDILHQWDLLDKGGSGHHHHHH

SEQ ID NO: 5121 - DNA, 639 bp, synthetic construct
  misc_feature 1..639: note = Variant of 3'O-kinase
  source 1..639: mol_type = other DNA
atggcggttaccattggtttaacaggagggatcgcagcgggcaaatcgactgtgagtgccatgatgcgtgaactgggtctgccggtcatcgatgctgacgaggcagcacgcgccgttatgaaaccaggcgaagaagcgtatcgcgacattgtagctgaattcgggccgggcatccttgctgaagatggccgtatcgatcgcgggaaactgcgtgccatccgcttttcggacgaacaacaacgtaaggtgctgaattcgattgtaggtcctgcagtcctgaagaagatgctcgcggagtgggaagctcatatcgggtcaggcgccaagacggttgtgctggatatcccgctgctgttcgaatccggattgcaatcgtggatggacaaagttctcgtggtgtacgttgatgatgatgttcagttacgccgccttatggcacgtaacgggctgactgaagaagaagctctgatgcgcattcgctcgcagtggcccagtgcggagaaagttaaacgtgcagacgctgtcatcgacaataatggcaccattgaagatacccgccgccagctgctggacattgtgcaccagtgggatctgctggacaaaggtggctccggccaccatcatcaccatcactaatga

SEQ ID NO: 5122 - protein, 211 aa, synthetic construct
  REGION 1..211: note = Variant of 3'O-kinase
MAVTIGLTGGIAAGKSTVSAMMRELGLPVIDADEAARAVMKPGEEAYRDIVAEFGPGILAEDGRIDRGKLRAIRFSDEQQRKVLNSIVGPAVLKKMLAEWEAHIGSGAKTVVLDIPLLFESGLQSWMDKVLVVYVDDDVQLRRLMARNGLTEEEALMRIRSQWPSAEKVKRADAVIDNNGTIEDTRRQLLDIVHQWDLLDKGGSGHHHHHH

SEQ ID NO: 5123 - DNA, 639 bp, synthetic construct
  misc_feature 1..639: note = Variant of 3'O-kinase
  source 1..639: mol_type = other DNA
atggcggttaccattggtttaacaggagggatcgcagcgggcaaatcgactgtgagtgccatgatgcgtgaactgggtctgccggtcatcgatgctgacgaggcagcacgcgccgttatgaaaccaggcgaagaagcgtatgaggacattgtagctgaattcgggccgggcatccttgctgaagatggccgtatcgatcgcgggaaactgcgtgccatccgcttttcggacgaacaacaacgtaaggtgctgaattcgattgtaggtcctgcagtcctgaagaagatgctcgcggagtgggaagctcatatcgggtcaggcgccaagacggttgtgctggatatcccgctgctgttcgaatccggattgcaatcgtggatggacaaagttctcgtggtgtacgttgatgatgatgttcagttacgccgccttatggcacgtaacgggctgactgaagaagaagctctgatgcgcattcgctcgcagtggcccagtgcggagaaagttaaacgtgcagacgctgtcatcgacaataatggcaccattgaagatacccgccgccagctgctggacattttacaccagtgggatctgctggacaaaggtggctccggccaccatcatcaccatcactaatga

SEQ ID NO: 5124 - protein, 211 aa, synthetic construct
  REGION 1..211: note = Variant of 3'O-kinase
MAVTIGLTGGIAAGKSTVSAMMRELGLPVIDADEAARAVMKPGEEAYEDIVAEFGPGILAEDGRIDRGKLRAIRFSDEQQRKVLNSIVGPAVLKKMLAEWEAHIGSGAKTVVLDIPLLFESGLQSWMDKVLVVYVDDDVQLRRLMARNGLTEEEALMRIRSQWPSAEKVKRADAVIDNNGTIEDTRRQLLDILHQWDLLDKGGSGHHHHHH

SEQ ID NO: 5125 - DNA, 639 bp, synthetic construct
  misc_feature 1..639: note = Variant of 3'O-kinase
  source 1..639: mol_type = other DNA
atggcggttaccattggtttaacaggagggatcgcagcgggcaaatcgactgtgagtgccatgatgcgtgaactgggtctgccggtcatcgatgctgacgaggcagcacgcgccgttatgaaaccaggcgaagaagcgtatcgcgacattgtagacgaattcgggccgggcatccttgctgaagatggccgtatcgatcgcgggaaactgcgtgccatccgcttttcggacgaacaacaacgtaaggtgctgaattcgattgtaggtcctgcagtcctgaagaagatgctcgcggagtgggaagctcatatcgggtcaggcgccaagacggttgtgctggatatcccgctgctgttcgaatccggattgcaatcgtggatggacaaagttctcgtggtgtacgttgatgatgatgttcagttacgccgccttatggcacgtaacgggctgactgaagaagaagctctgatgcgcattcgctcgcagtggcccagtgcggagaaagttaaacgtgcagacgctgtcatcgacaataatggcaccattgaagatacccgccgccagctgctggacattttacaccagtgggatctgctggacaaaggtggctccggccaccatcatcaccatcactaatga

SEQ ID NO: 5126 - protein, 211 aa, synthetic construct
  REGION 1..211: note = Variant of 3'O-kinase
MAVTIGLTGGIAAGKSTVSAMMRELGLPVIDADEAARAVMKPGEEAYRDIVDEFGPGILAEDGRIDRGKLRAIRFSDEQQRKVLNSIVGPAVLKKMLAEWEAHIGSGAKTVVLDIPLLFESGLQSWMDKVLVVYVDDDVQLRRLMARNGLTEEEALMRIRSQWPSAEKVKRADAVIDNNGTIEDTRRQLLDILHQWDLLDKGGSGHHHHHH

SEQ ID NO: 5127 - DNA, 1260 bp, synthetic construct
  misc_feature 1..1260: note = Variant of acetate kinase
  source 1..1260: mol_type = other DNA
atgcaccatcatcatcatcatggcggtagcggcatgaaaattctggttatcaattcaggtagtagcagcgtgaaatatcagttcatcgatatgaacggcgaaaaagtcctttgcaagggaattgcggagcgcattggcatttcggggtctcgtctgatccataaagtacgcggcgaaaagcacgtgatcgagaaagacttgccggattacgaagttgcactgaaactcattttagataccctgatggacgaaaaactgggtgtgatcaaagatctgtccgaaattggtgctgtcggccatcgtgtagttcacggtggtgagatctttgccagtagcgtcttgattgacgacgaagtgattaaggtgctcgaagaatattcgtacttagccccactgcataaccctccgaatctgatgggcatcaaagcgtccatgaaactgctgccgaaggtgcccaacgttgcggtctttgatacggcattccaccaatcaatgccgcgcaaagcctttttgtatgcgatcccatacgagtattatgagaaataccgtatccgccgctatgggttccatggcactagccatcgttacgtgtcgaaacgtgctgctgaaattcttgggaagtcctataaagaactgaagatcattacctgtcacttaggcaatggtgcaagcattgcggcggttaagaacggcaaaagtgtggatacatctatgggatttacgccgcttgaaggtctggtaatgggaacccgctctggcgatattgatcctagcatcgtcgtctttctgcaggagaaagaaggtttaagtccgcaggacgtgtacgatattctcaataagaaatctggcgttctgggtctgtcgaaaggattctcacccgacatgcgtgatatcgaagaagccgcaatgaacggcgatgaaaccgcgcgtacggctttggacgtgtatgagtatcgcattgccaaatacattggtgcttatgcagcggtaatgaacggcgttgatgcgatcgtgtttactgccggtgtaggcgaaaatagcccgattattcgcgaagaaatctgcgagaactacctggggtatcttggcgtcaagatcgacaaagagaagaatgatgttatgggtgaagaacgtattattagtaccccggattccaaagtggcagttctggtgatcccaacaaacgaagaactcgtcattgctcgcgacaccaaagagatcgtagagaaagggatcaaagaactgaagattgtgtaatga

SEQ ID NO: 5128 - protein, 418 aa, synthetic construct
  REGION 1..418: note = Variant of acetate kinase
MHHHHHHGGSGMKILVINSGSSSVKYQFIDMNGEKVLCKGIAERIGISGSRLIHKVRGEKHVIEKDLPDYEVALKLILDTLMDEKLGVIKDLSEIGAVGHRVVHGGEIFASSVLIDDEVIKVLEEYSYLAPLHNPPNLMGIKASMKLLPKVPNVAVFDTAFHQSMPRKAFLYAIPYEYYEKYRIRRYGFHGTSHRYVSKRAAEILGKSYKELKIITCHLGNGASIAAVKNGKSVDTSMGFTPLEGLVMGTRSGDIDPSIVVFLQEKEGLSPQDVYDILNKKSGVLGLSKGFSPDMRDIEEAAMNGDETARTALDVYEYRIAKYIGAYAAVMNGVDAIVFTAGVGENSPIIREEICENYLGYLGVKIDKEKNDVMGEERIISTPDSKVAVLVIPTNEELVIARDTKEIVEKGIKELKIV

SEQ ID NO: 5129 - DNA, 20 bp, synthetic construct
  misc_feature 1..20: note = Modified oligo substrate or product
  modified_base 1: mod_base = OTHER; note = 5'-6-carboxyfluorescein-thymidine
  modified_base 18: mod_base = OTHER; note = 2'-O-methyladenosine
  modified_base 19: mod_base = OTHER; note = 2'-O-methyluridine
  modified_base 20: mod_base = OTHER; note = 2'-O-methylcytidine
  source 1..20: mol_type = other DNA
nttttttttttttttttnnn

SEQ ID NO: 5130 - DNA, 21 bp, synthetic construct
  misc_feature 1..21: note = Modified oligo substrate or product
  modified_base 1: mod_base = OTHER; note = 5'-6-carboxyfluorescein-thymidine
  modified_base 18: mod_base = OTHER; note = 2'-O-methyladenosine
  modified_base 19: mod_base = OTHER; note = 2'-O-methyluridine
  modified_base 20: mod_base = OTHER; note = 2'-O-methylcytidine
  modified_base 21: mod_base = OTHER; note = adenosine ribonucleotide with a 3'-PO4 blocking group
  source 1..21: mol_type = other DNA
nttttttttttttttttnnnn

SEQ ID NO: 5131 - DNA, 21 bp, synthetic construct
  misc_feature 1..21: note = Modified oligo substrate or product
  modified_base 1: mod_base = OTHER; note = 5'-6-carboxyfluorescein-thymidine
  modified_base 18: mod_base = OTHER; note = 2'-O-methyladenosine
  modified_base 19: mod_base = OTHER; note = 2'-O-methyluridine
  modified_base 20: mod_base = OTHER; note = 2'-O-methylcytidine
  modified_base 21: mod_base = OTHER; note = cytidine ribonucleotide with a 3'-PO4 blocking group
  source 1..21: mol_type = other DNA
nttttttttttttttttnnnn

SEQ ID NO: 5132 - DNA, 21 bp, synthetic construct
  misc_feature 1..21: note = Modified oligo substrate or product
  modified_base 1: mod_base = OTHER; note = 5'-6-carboxyfluorescein-thymidine
  modified_base 18: mod_base = OTHER; note = 2'-O-methyladenosine
  modified_base 19: mod_base = OTHER; note = 2'-O-methyluridine
  modified_base 20: mod_base = OTHER; note = 2'-O-methylcytidine
  modified_base 21: mod_base = OTHER; note = guanosine ribonucleotide with a 3'-PO4 blocking group
  source 1..21: mol_type = other DNA
nttttttttttttttttnnnn

SEQ ID NO: 5133 - DNA, 21 bp, synthetic construct
  misc_feature 1..21: note = Modified oligo substrate or product
  modified_base 1: mod_base = OTHER; note = 5'-6-carboxyfluorescein-thymidine
  modified_base 18: mod_base = OTHER; note = 2'-O-methyladenosine
  modified_base 19: mod_base = OTHER; note = 2'-O-methyluridine
  modified_base 20: mod_base = OTHER; note = 2'-O-methylcytidine
  modified_base 21: mod_base = OTHER; note = uridine ribonucleotide with a 3'-PO4 blocking group
  source 1..21: mol_type = other DNA
nttttttttttttttttnnnn

SEQ ID NO: 5134 - DNA, 21 bp, synthetic construct
  misc_feature 1..21: note = Modified oligo substrate or product
  modified_base 1: mod_base = OTHER; note = 5'-6-carboxyfluorescein-thymidine
  modified_base 18: mod_base = OTHER; note = 2'-O-methyladenosine
  modified_base 19: mod_base = OTHER; note = 2'-O-methyluridine
  modified_base 20: mod_base = OTHER; note = 2'-O-methylcytidine
  modified_base 21: mod_base = OTHER; note = 2'-deoxyfluoroadenosine with a 3'-PO4 blocking group
  source 1..21: mol_type = other DNA
nttttttttttttttttnnnn

SEQ ID NO: 5135 - DNA, 21 bp, synthetic construct
  misc_feature 1..21: note = Modified oligo substrate or product
  modified_base 20^21: mod_base = OTHER; note = there is a phosphorothioate bond between these bases
  modified_base 1: mod_base = OTHER; note = 5'-6-carboxyfluorescein-thymidine
  modified_base 18: mod_base = OTHER; note = 2'-O-methyladenosine
  modified_base 19: mod_base = OTHER; note = 2'-O-methyluridine
  modified_base 20: mod_base = OTHER; note = 2'-O-methylcytidine
  modified_base 21: mod_base = OTHER; note = cytidine ribonucleotide with a 3'-PO4 blocking group
  source 1..21: mol_type = other DNA
nttttttttttttttttnnnn
